(19) United States
(12) Patent Application Publication
(10) Pub. No.: US 2024/0276987 A1
(43) Pub. Date: Aug. 22, 2024

(54) Compositions and Methods for Improving the Rainfastness of Proteins on Plant Surfaces

(71) Applicants: NOVOZYMES A/S, Bagsvaerd (DK); NOVOZYMES BIOAG A/S, Bagsvaerd (DK)

(72) Inventors: Callum Russell, Durham, NC (US); Asbjoern Toftgaard Pedersen, Copenhagen (DK); Kenneth Edmund Kellar, Durham, NC (US); Alexander Findelsen, Bagsvaerd (DK); Kate Sarah Brandon Sutton, Durham, NC (US); Svend Gunna Kaasgaard, Svovlunde (DK); Ines Marques Nunes, Malmo (SE); Gregory Stephen Maloney, Durham, NC (US); Casey Ruark-Seward, Salem, VA (US); Mary Ann Stringer, Soeborg (DK); Jason Quinlan, Davis, CA (US); Sharon Inch, Durham (NC)

(73) Assignees: NOVOZYMES A/S, Bagsvaerd (DK); NOVOZYMES BIOAG A/S, Bagsvaerd (DK)

(21) Appl. No.: 18/567,686

(22) PCT Filed: Jul. 15, 2022
(86) PCT No.: PCT/US2022/073761

§ 371 Date: Dec. 6, 2023

Related U.S. Application Data
(60) Provisional application No. 63/342,064, filed on May 14, 2022.
(60) Provisional application No. 63/222,612, filed on Jul. 16, 2021.
(60) Provisional application No. 63/222,620, filed on Jul. 16, 2021.

(51) Int. Cl. A01N 55/02; A01N 25/24; A01N 63/50

(52) U.S. Cl. CPC A01N 55/02; A01N 25/24; A01N 63/50

(57) ABSTRACT

The present disclosure provides compositions and methods for improving the rainfastness of proteins, such as enzymes and cell-signaling peptides, on plants and other surfaces that may be susceptible to infestation and/or infection by bacteria, fungi, etc. Particularly useful are rain fasteners selected from the group consisting of organo-modified siloxanes, such as polyether trisiloxanes.

### RELATED APPLICATIONS

[0001] This application claims priority to U.S. Provisional Application Nos. 63/222,612, filed Jul. 16, 2021; 63/222,620, filed Jul. 16, 2021; and 63/342,064, filed May 14, 2022, the disclosure of each of which is incorporated herein by reference in its entirety.

### REFERENCE TO A SEQUENCE LISTING

[0002] The application contains a Sequence Listing in computer readable form, which is incorporated herein by reference in its entirety.

### FIELD OF THE INVENTION

[0003] The present disclosure relates to compositions and methods for improving the rainfastness of proteins, including enzymes, on the surfaces of plants and plant parts.

### BACKGROUND

[0004] Myriad chemical compounds are currently approved for use as phytoprotective agents. However, due to the ecotoxicological effects of many of these agrochemicals, it is highly desirable to develop effective and environmentally friendly alternatives.

[0005] Protein-based actives, such as enzymes, cell-signaling proteins and antibodies, are particularly desirable because they are capable of exerting very specific and very effective phytoprotective activities and because they are biodegradable and will not accumulate in the environment even after many years of use.

[0006] Unfortunately, because proteins tend to be highly water-soluble, they are susceptible to being washed off by rain and/or irrigation events. In most instances, a rain or irrigation event that occurs immediately after or soon after treatment will remove all or substantially all the protein-based active from the surface of the treated plant(s).

[0007] The present disclosure provides compositions and methods for improving the rainfastness of a protein on a plant surface (i.e., for increasing the likelihood the protein will remain on the plant surface following a rain or irrigation event).

### DETAILED DESCRIPTION

[0008] This description is not intended to be a detailed catalog of all the different ways in which the inventive concepts disclosed herein may be implemented or of all the features that may be added thereto. For example, features illustrated with respect to one embodiment may be incorporated into other embodiments and features illustrated with respect to a particular embodiment may be deleted from that embodiment. In addition, numerous variations and additions to the various embodiments suggested herein, which do not depart from the instant inventions, will be apparent to those skilled in the art in light of the instant disclosure. Hence, the following description is intended to illustrate some embodiments of the instant inventions and not to exhaustively specify all permutations, combinations and variations thereof.

[0009] The terminology used herein is for the purpose of describing particular embodiments only and is not intended to be limiting of the instant inventions.

[0010] Unless otherwise defined, all terms (including technical and scientific terms) used herein have the same meaning as commonly understood by one of ordinary skill in the art to which the inventions belong. It will be further understood that terms, such as those defined in commonly used dictionaries, should be interpreted as having a meaning that is consistent with their meaning in the context of the specification and relevant art and should not be interpreted in an idealized or overly formal sense unless expressly so defined herein. For the sake of brevity and/or clarity, well-known functions or constructions may not be described in detail.

[0011] As used herein, the singular forms “a,” “an,” and “the” are intended to include the plural forms as well, unless the context clearly indicates otherwise.

[0012] As used herein, “additive,” when referring to effects of combinations within a composition means that the effects of the combinations are generally about the same as the sum of effects of the individual components of the combination alone. The combination of individual components producing this effect may be called an additive combination.

[0013] As used herein, the term “agriculturally acceptable carrier” refers to a substance or composition that can be used to deliver an agriculturally beneficial agent to a plant, plant part or plant growth medium (e.g., soil) without causing/having an unduly adverse effect on plant growth and/or yield. As used herein, the term “foliar-compatible carrier” refers to a material that can be foliarly applied to a plant or plant part without causing/having an unduly adverse effect on the plant, plant part, plant growth, plant health, or the like. As used herein, the term “seed-compatible carrier” refers to a material that can be applied to a seed without causing/having an unduly adverse effect on the seed, the plant that grows from the seed, seed germination, or the like. As used herein, the term “soil-compatible carrier” refers to a material that can be added to a soil without causing/having an unduly adverse effect on plant growth, soil structure, soil drainage, or the like.

[0014] As used herein, the term “agriculturally beneficial microorganism” refers to a microorganism having at least one agriculturally beneficial property (e.g., the ability to fix nitrogen, the ability to solubilize phosphate and/or the ability to produce an agriculturally beneficial agent, such as a plant signal molecule).

[0015] As used herein, the term “and/or” is intended to include any and all combinations of one or more of the associated listed items, as well as the lack of combinations when interpreted in the alternative (“or”). Thus, the phrase “A, B and/or C” is to be interpreted as “A, A and B, A and B and C, A and C, B, B and C, or C.”

[0016] As used herein, “antagonistic,” when referring to effects of combinations within a composition means that the effects of the combinations are generally less than the sum of effects of the individual components of the combination alone. These compositions may be called antagonistic combinations.

[0017] As used herein, the term “aqueous” refers to a composition that contains more than a trace amount of water (i.e., more than 0.5% water by weight, based upon the total weight of the composition).

[0018] As used herein, the terms “associated with,” in association with” and “associated therewith,” when used in reference to a relationship between a composition of the present disclosure and a plant or plant part, refer to at least a juxtaposition or close proximity of the composition and the plant or plant part. Such a juxtaposition or close proximity may be achieved by contacting or applying the composition directly to the plant or plant part and/or by applying the composition to the plant growth medium (e.g., soil) in which the plant or plant part will be grown (or is currently being grown). According to some embodiments, the composition is applied as a coating to the outer surface of the plant or plant part. According to some embodiments, the composition is applied to soil at, near or surrounding the site in which the plant or plant part will be grown (or is currently being grown).

[0019] As used herein, the term “biostimulant” refers to an agent or combination of agents the application of which enhances one or more metabolic and/or physiological processes of a plant or plant part (e.g., carbohydrate biosynthesis, ion uptake, nucleic acid uptake, nutrient delivery, photosynthesis and/or respiration).

[0020] As used herein, the term “binding module” refers to the region of an enzyme that mediates binding to the enzyme to a substrate.

[0021] As used herein, the term “catalytic domain” refers to the region of an enzyme containing the catalytic machinery of the enzyme.

[0022] As used herein, the term “cDNA” refers to a DNA molecule that can be prepared by reverse transcription from a mature, spliced, mRNA molecule obtained from a eukaryotic or prokaryotic cell. cDNAs lack intron sequences that may be present in the corresponding genomic DNA. The initial, primary RNA transcript is a precursor to mRNA that is processed through a series of steps, including splicing, before appearing as mature spliced mRNA.

[0023] As used herein, the term “coding sequence” refers to a polynucleotide that directly specifies the amino acid sequence of a polypeptide. The boundaries of the coding sequence are generally determined by an open reading frame, which begins with a start codon, such as ATG, GTG, or TTG, and ends with a stop codon, such as TAA, TAG, or TGA. The coding sequence may be a genomic DNA, cDNA, synthetic DNA, or a combination thereof.

[0024] As used herein, the terms “colony forming unit” and “cfu” refer to a microbial cell/spore capable of propagating on or in a suitable growth medium or substrate (e.g., a soil) when conditions (e.g., temperature, moisture, nutrient availability, pH, etc.) are favorable for germination and/or microbial growth.

[0025] As used herein, the term “consists essentially of,” when used in reference to compositions and methods of the present disclosure, means that the compositions/methods may contain additional components/steps so long as the additional components/steps do not materially alter the composition/method. The term “materially alter,” as applied to a composition/method of the present disclosure, refers to an increase or decrease in the effectiveness of the composition/method of at least 20%. For example, a component added to a composition of the present disclosure may be deemed to “materially alter” the composition if it increases or decreases the composition's ability to inhibit the growth of a target phytopathogen by at least 20%.

[0026] As used herein, the term “control sequences” refers to nucleic acid sequences involved in regulation of expression of a polynucleotide in a specific organism or in vitro. Each control sequence may be native (i.e., from the same gene) or heterologous (i.e., from a different gene) to the polynucleotide encoding the polypeptide, and native or heterologous to each other. Such control sequences include, but are not limited to leader, polyadenylation, prepropeptide, propeptide, signal peptide, promoter, terminator, enhancer, and transcription or translation initiator and terminator sequences. At a minimum, the control sequences include a promoter, and transcriptional and translational stop signals. The control sequences may be provided with linkers for the purpose of introducing specific restriction sites facilitating ligation of the control sequences with the coding region of the polynucleotide encoding a polypeptide.

[0027] As used herein, the term “diazotroph” refers to an organism capable of converting atmospheric nitrogen (N₂) into a form that may be utilized by a plant or plant part (e.g., ammonia (NH₃), ammonium (NH₄+), etc.).

[0028] As used herein, the term “dispersant” refers to an agent or combination of agents the application of which reduces the cohesiveness of like particles, the surface tension of a liquid, the interfacial tension between two liquids and/or the interfacial tension between or a liquid and a solid.

[0029] As used herein, the terms “effective amount,” “effective concentration” and “effective amount/concentration” refer to an amount or concentration that is sufficient to cause a desired effect (e.g., inhibiting plant disease, enhancing plant yield). The absolute value of the amount/concentration that is sufficient to cause the desired effect may be affected by factors such as the type and magnitude of effect desired, the type, size and volume of material to which the composition will be applied, the type(s) of enzymes in the composition, the amount(s) of enzyme(s) in the composition, the stability of the enzyme(s) in the composition and the storage conditions (e.g., temperature, relative humidity, duration). Those skilled in the art will understand how to select an effective amount/concentration using routine dose-response experiments. In some examples, an effective amount of a substance when used alone may be different than an effective amount of the same substance when used as part of a combination.

[0030] As used herein, the terms “enhanced growth” and “enhanced plant growth” refer to an improvement in one or more characteristics of plant growth and/or development as compared to one or more control plants (e.g., a plant germinated from an untreated seed or an untreated plant). Exemplary plant growth/development characteristics include, but are not limited to, biomass, carbohydrate biosynthesis, chlorophyll content, cold tolerance, drought tolerance, height, leaf length, leaf mass, leaf number, leaf surface area, leaf volume, nutrient uptake (e.g., calcium, magnesium, nitrogen, phosphorous and/or potassium uptake), rate(s) of photosynthesis, root area, root diameter, root length, root mass, root nodulation (e.g., nodule mass, nodule number, nodule volume), root number, root surface area, root volume, salt tolerance, seed germination, seedling emergence, shoot diameter, shoot length, shoot mass, shoot number, shoot surface area, shoot volume, spread, stomatal conductance and survival rate.

[0031] As used herein, the terms “enhanced stability” and “enhanced enzyme stability” refer to an improvement in one or more characteristics of enzyme stability as compared to one or more controls (e.g., a control composition that is identical to a composition of the present disclosure except that it lacks one or more of the components found in the composition of the present disclosure). Exemplary enzyme stability characteristics include, but are not limited to, maintenance of enzymatic activity after being applied to a plant or plant part and/or stored for a defined period of time and the ability to cause a desired effect (e.g., reduced phytopathogenicity of a target pest) after being applied to a plant or plant part and/or stored for a defined period of time.

[0032] As used herein, the terms “enhanced yield” and “enhanced plant yield” refer to an improvement in one or more characteristics of plant yield as compared to one or more control plants (e.g., a control plant germinated from an untreated seed). Exemplary plant yield characteristics include, but are not limited to, biomass; bushels per acre; grain weight per plot (GWTPP); nutritional content; percentage of plants in a given area (e.g., plot) that fail to produce grain; yield at standard moisture percentage (YSMP), such as grain yield at standard moisture percentage (GYSMP); yield per plot (YPP), such as grain weight per plot (GWTPP); and yield reduction (YRED).

[0033] As used herein, the term “expression” refers to any step involved in the production of a polypeptide including, but not limited to, transcription, post-transcriptional modification, translation, post-translational modification, and secretion. Expression can be measured—for example, to detect increased expression—by techniques known in the art, such as measuring levels of mRNA and/or translated polypeptide.

[0034] As used herein, the term “expression vector” refers to a linear or circular DNA construct comprising a DNA sequence encoding a polypeptide, which coding sequence is operably linked to a suitable control sequence capable of effecting expression of the DNA in a suitable host. Such control sequences may include a promoter to effect transcription, an optional operator sequence to control transcription, a sequence encoding suitable ribosome binding sites on the mRNA, enhancers and sequences which control termination of transcription and translation.

[0035] As used herein, the term “extension” refers to an addition of one or more amino acids to the amino and/or carboxyl terminus of a polypeptide.

[0036] As used herein, the term “foliage” refers to those portions of a plant that normally grow above the ground, including, but not limited to, leaves, stalks, stems, flowers, fruiting bodies and fruits.

[0037] As used herein, the terms “foliar application” and “foliarly applied” refer to the application of one or more active ingredients to the foliage of a plant (e.g., to the leaves of the plant). Application may be affected by any suitable means, including, but not limited to, spraying/fogging the plant with a composition comprising the active ingredient(s). In some embodiments, the active ingredient(s) is/are applied to the leaves, stems and/or stalk of the plant and not to the flowers, fruiting bodies or fruits of the plant.

[0038] As used herein, the term “fragment” refers to a polypeptide having one or more amino acids absent from the amino and/or carboxyl terminus of the mature polypeptide.

[0039] As used herein, the term “fusion polypeptide” refers to a polypeptide in which one polypeptide is fused at the N-terminus and/or the C-terminus of a polypeptide of the present disclosure. A fusion polypeptide is produced by fusing a polynucleotide encoding another polypeptide to a polynucleotide of the present disclosure, or by fusing two or more polynucleotides of the present disclosure together. Techniques for producing fusion polypeptides are known in the art and include ligating the coding sequences encoding the polypeptides so that they are in frame and that expression of the fusion polypeptide is under control of the same promoter(s) and terminator. Fusion polypeptides may also be constructed using intein technology in which fusion polypeptides are created post-translationally (Cooper et al., 1993, EMBO J. 12: 2575-2583; Dawson et al., 1994, Science 266: 776-779). A fusion polypeptide can further comprise a cleavage site between the two polypeptides. Upon secretion of the fusion protein, the site is cleaved releasing the two polypeptides. Examples of cleavage sites include, but are not limited to, the sites disclosed in Martin et al., 2003, J. Ind. Microbiol. Biotechnol. 3: 568-576; Svetina et al., 2000, J. Biotechnol. 76: 245-251; Rasmussen-Wilson et al., 1997, Appl. Environ. Microbiol. 63: 3488-3493; Ward et al., 1995, Biotechnology 13: 498-503; and Contreras et al., 1991, Biotechnology 9: 378-381; Eaton et al., 1986, Biochemistry 25: 505-512; Collins-Racie et al., 1995, Biotechnology 13: 982-987; Carter et al., 1989, Proteins: Structure, Function, and Genetics 6: 240-248; and Stevens, 2003, Drug Discovery World 4: 35-48.

[0040] As used herein, the term “heterologous,” when used to describe the relationship between a polynucleotide or polypeptide and a host cell, refers to a polynucleotide or polypeptide that does not naturally occur in the host cell.

[0041] As used herein, the term “heterologous,” when used to describe the relationship between a polynucleotide or polypeptide and a control sequence (e.g., a promoter sequence), refers to a polynucleotide or polypeptide is not naturally associated with the control sequence (i.e., the control sequence is from a gene other than the gene encoding the mature polypeptide).

[0042] As used herein, the terms “host strain” and “host cell” refer to an organism into which an expression vector, phage, virus, or other DNA construct, including a polynucleotide encoding a polypeptide of interest (e.g., an amylase) has been introduced. Exemplary host strains are microorganism cells (e.g., bacteria, filamentous fungi, and yeast) and plant cells capable of expressing a protein of interest. The term “host cell” includes protoplasts created from cells.

[0043] As used herein, the terms “inoculant composition” and “inoculum” refer to a composition comprising microbial cells and/or spores, said cells/spores being capable of propagating/germinating on or in a suitable growth medium or substrate (e.g., a soil) when conditions (e.g., temperature, moisture, nutrient availability, pH, etc.) are favorable for germination and/or microbial growth.

[0044] As used herein, the term “introduced,” when used to describe the insertion of a nucleic acid sequence into a cell, encompasses “transfection”, “transformation” or “transduction,” as known in the art.

[0045] As used herein, the term “isolated” refers to a polypeptide, nucleic acid, cell, or other specified material or component that has been separated from at least one other material or component, including but not limited to, other proteins, nucleic acids, cells, etc. An isolated polypeptide, nucleic acid, cell or other material is thus in a form that does not occur in nature. An isolated polypeptide includes, but is not limited to, a culture broth containing the secreted polypeptide expressed in a host cell.

[0046] As used herein, the term “isomer” includes all stereoisomers of the compounds and/or molecules to which it refers, including enantiomers and diastereomers, as well as all conformers, roatmers and tautomers, unless otherwise indicated. Compounds and/or molecules disclosed herein include all enantiomers in either substantially pure levorotatory or dextrorotatory form, or in a racemic mixture, or in any ratio of enantiomers. Where embodiments disclose a (D)-enantiomer, that embodiment also includes the (L)-enantiomer; where embodiments disclose a (L)-enantiomer, that embodiment also includes the (D)-enantiomer. Where embodiments disclose a (+)-enantiomer, that embodiment also includes the (−)-enantiomer; where embodiments disclose a (−)-enantiomer, that embodiment also includes the (+)-enantiomer. Where embodiments disclose a (S)-enantiomer, that embodiment also includes the (R)-enantiomer; where embodiments disclose a (R)-enantiomer, that embodiment also includes the (S)-enantiomer. Embodiments are intended to include any diastereomers of the compounds and/or molecules referred to herein in diastereomerically pure form and in the form of mixtures in all ratios. Unless stereochemistry is explicitly indicated in a chemical structure or chemical name, the chemical structure or chemical name is intended to embrace all possible stereoisomers, conformers, rotamers and tautomers of compounds and/or molecules depicted.

[0047] As used herein, the term “mature polypeptide” refers to a polypeptide in its mature form following N-terminal and/or C-terminal processing (e.g., removal of signal peptide).

[0048] As used herein, the term “mature polypeptide coding sequence” refers to a polynucleotide that encodes a mature polypeptide.

[0049] As used herein, the term “modified microbial strain” refers to a microbial strain that is modified from a strain isolated from nature. Modified microbial strains may be produced by any suitable method(s), including, but not limited to, chemical or other form of induced mutation to a polynucleotide within any genome within the strain; the insertion or deletion of one or more nucleotides within any genome within the strain, or combinations thereof; an inversion of at least one segment of DNA within any genome within the strain; a rearrangement of any genome within the strain; generalized or specific transduction of homozygous or heterozygous polynucleotide segments into any genome within the strain; introduction of one or more phage into any genome of the strain; transformation of any strain resulting in the introduction into the strain of stably replicating autonomous extrachromosomal DNA; any change to any genome or to the total DNA composition within the strain isolated from nature as a result of conjugation with any different microbial strain; and any combination of the foregoing. The term modified microbial strains includes a strain with (a) one of more heterologous nucleotide sequences, (b) one or more non-naturally occurring copies of a nucleotide sequence isolated from nature (i.e., additional copies of a gene that naturally occurs in the microbial strain from which the modified microbial strain was derived), (c) a lack of one or more nucleotide sequences that would otherwise be present in the natural reference strain by for example deleting nucleotide sequence, and (d) added extrachromosomal DNA. In some embodiments, modified microbial strains comprise a combination of two or more nucleotide sequences (e.g., two or more naturally occurring genes that do not naturally occur in the same microbial strain) or comprise a nucleotide sequence isolated from nature at a locus that is different from the natural locus.

[0050] As used herein, the term “native” refers to a polynucleotide or polypeptide naturally occurring in a host cell.

[0051] As used herein, the term “naturally occurring” refers to anything (e.g., proteins, amino acids, or nucleic acid sequences) that is found in nature. Conversely, the term “non-naturally occurring” refers to anything that is not found in nature (e.g., recombinant nucleic acids and protein sequences produced in a laboratory, modification of a wild-type sequence, formulations comprising one or more synthetic components, formulations comprising an artificial combination of otherwise naturally occurring components).

[0052] As used herein, the term “non-aqueous” refers to a composition that comprises no more than a trace amount of water (i.e., no more than 0.5% water by weight, based upon the total weight of the composition).

[0053] As used herein, the term “nutrient” refers to a compound or element useful for nourishing a plant (e.g., vitamins, macrominerals, micronutrients, trace minerals, organic acids, etc. that are necessary for plant growth and/or development).

[0054] As used herein, the term “polynucleotide” encompasses DNA, RNA, heteroduplexes, and synthetic molecules capable of encoding a polypeptide. Polynucleotides may be single-stranded or double-stranded and may comprise chemical modifications. The terms “nucleic acid” and “polynucleotide” are used interchangeably. Because the genetic code is degenerate, more than one codon may be used to encode a particular amino acid, and the present compositions and methods encompass nucleotide sequences that encode a particular amino acid sequence. Unless otherwise indicated, nucleic acid sequences are presented in 5′-to-3′ orientation.

[0055] As used herein, the term “nucleic acid construct” refers to a polynucleotide, either single- or double-stranded, which is isolated from a naturally occurring gene or is modified to contain segments of nucleic acids in a manner that would not otherwise exist in nature or which is synthetic, and which comprises one or more control sequences operably linked to the nucleic acid sequence.

[0056] As used herein, the term “operably linked” means that specified components are in a relationship (including but not limited to juxtaposition) permitting them to function in an intended manner. For example, a regulatory sequence is operably linked to a coding sequence such that expression of the coding sequence is under control of the regulatory sequence.

[0057] As used herein, the term “phosphate-solubilizing microorganism” refers to a microorganism capable of converting insoluble phosphate into a soluble form of phosphate.

[0058] As used herein, the term “phytopathogenic pest” includes any organism or virus that negatively affects a plant, including, but not limited to, organisms and viruses that spread disease, damage host plants and/or compete for soil nutrients. The term “phytopathogenic pest” encompasses organisms and viruses that are known to associate with plants and to cause a detrimental effect on the plant's health and/or vigor. Phytopathogenic pests include, but are not limited to, arachnids (e.g., mites, ticks, spiders, etc.), bacteria, fungi, gastropods (e.g., slugs, snails, etc.), invasive plants (e.g., weeds), insects (e.g., white flies, thrips, weevils, etc.), nematodes (e.g., root-knot nematode, soybean cyst nematode, etc.), rodents and viruses (e.g., tobacco mosaic virus (TMV), tomato spotted wilt virus (TSWV), cauliflower mosaic virus (CaMV), etc.).

[0059] As used herein, the term “plant” includes all plant populations, including, but not limited to, agricultural, horticultural and silvicultural plants. The term “plant” encompasses plants obtained by conventional plant breeding and optimization methods (e.g., marker-assisted selection) and plants obtained by genetic engineering, including cultivars protectable and not protectable by plant breeders' rights.

[0060] As used herein, the term “plant cell” refers to a cell of an intact plant, a cell taken from a plant, or a cell derived from a cell taken from a plant. Thus, the term “plant cell” includes cells within seeds, suspension cultures, embryos, meristematic regions, callus tissue, leaves, shoots, gametophytes, sporophytes, pollen and microspores.

[0061] As used herein, the term “plant growth regulator” refers to an agent or combination of agents the application of which accelerates or retards the growth/maturation rate of a plant through direct physiological action on the plant or which otherwise alters the behavior of a plant through direct physiological action on the plant. “Plant growth regulator” shall not be interpreted to include any agent or combination of agents excluded from the definition of “plant regulator” that is set forth section 2(v) of the Federal Insecticide, Fungicide, and Rodenticide Act (7 U.S.C. § 136(v)). Thus, “plant growth regulator” does not encompass microorganisms applied to a plant, plant part or plant growth medium for the purpose of enhancing the availability and/or uptake of nutrients, nutrients necessary to normal plant growth, soil amendments applied for the purpose of improving soil characteristics favorable for plant growth or vitamin hormone products as defined by 40 C.F.R. § 152.6(f).

[0062] As used herein, the term “plant part” refers to any part of a plant, including cells and tissues derived from plants. Thus, the term “plant part” may refer to any of plant components or organs (e.g., leaves, stems, roots, etc.), plant tissues, plant cells and seeds. Examples of plant parts, include, but are not limited to, anthers, embryos, flowers, fruits, fruiting bodies, leaves, ovules, pollen, rhizomes, roots, seeds, shoots, stems and tubers, as well as scions, rootstocks, protoplasts, calli and the like.

[0063] As used herein, the term “plant propagation material” refers to a plant part from which a whole plant can be generated. Examples of plant propagation materials include, but are not limited to, cuttings (e.g., leaves, stems), rhizomes, seeds, tubers and cells/tissues that can be cultured into a whole plant.

[0064] As used herein, the term “protein” is not meant to refer to a specific amino acid chain length and encompasses peptides, oligopeptides and polypeptides. It is to be understood that the term “protein” also encompasses two or more polypeptides combined to form an encoded product, as well as hybrid polypeptides and fusion polypeptides.

[0065] As used herein, the term “purified” refers to a polynucleotide, protein or cell that is substantially free from other components as determined by analytical techniques well known in the art (e.g., a purified polynucleotide or protein may form a discrete band in an electrophoretic gel, chromatographic eluate, and/or a media subjected to density gradient centrifugation). A purified polynucleotide or protein is at least about 50% pure, usually at least about 60%, about 65%, about 70%, about 75%, about 80%, about 85%, about 90%, about 91%, about 92%, about 93%, about 94%, about 95%, about 96%, about 97%, about 98%, about 99%, about 99.5%, about 99.6%, about 99.7%, about 99.8% or more pure (e.g., percent by weight or on a molar basis). In a related sense, a composition is enriched for a molecule when there is a substantial increase in the concentration of the molecule after application of a purification or enrichment technique. The term “enriched” refers to a compound, polynucleotide, protein, cell, nucleic acid, amino acid, or other specified material or component that is present in a composition at a relative or absolute concentration that is higher than a starting composition.

[0066] In one aspect, the term “purified” as used herein refers to the protein or cell being essentially free from components (especially insoluble components) from the production organism. In other aspects. the term “purified” refers to the protein being essentially free of insoluble components (especially insoluble components) from the native organism from which it is obtained. In one aspect, the protein is separated from some of the soluble components of the organism and culture medium from which it is recovered. The protein may be purified (i.e., separated) by one or more of the unit operations filtration, precipitation, or chromatography.

[0067] Accordingly, the protein may be purified such that only minor amounts of other proteins, in particular, other proteins, are present. The term “purified” as used herein may refer to removal of other components, particularly other proteins and most particularly other enzymes present in the cell of origin of the protein. The protein may be “substantially pure”, i.e., free from other components from the organism in which it is produced, e.g., a host organism for recombinantly produced protein. In one aspect, the protein is at least 40% pure by weight of the total protein material present in the preparation. In one aspect, the protein is at least 50%, 60%, 70%, 80% or 90% pure by weight of the total protein material present in the preparation. As used herein. a “substantially pure protein” may denote a protein preparation that contains at most 10%, preferably at most 8%, more preferably at most 6%, more preferably at most 5%, more preferably at most 4%, more preferably at most 3%, even more preferably at most 2%, most preferably at most 1%, and even most preferably at most 0.5% by weight of other protein material with which the protein is natively or recombinantly associated.

[0068] It is, therefore, preferred that the substantially pure protein is at least 92% pure, preferably at least 94% pure, more preferably at least 95% pure, more preferably at least 96% pure, more preferably at least 97% pure, more preferably at least 98% pure, even more preferably at least 99% pure, most preferably at least 99.5% pure by weight of the total protein material present in the preparation. Proteins of the present disclosure are preferably in a substantially pure form (i.e., the preparations are essentially free of other protein material). This can be accomplished, for example by preparing the protein by well-known recombinant methods or by classical purification methods.

[0069] As used herein, the term “recombinant” is used in its conventional meaning to refer to the manipulation, e.g., cutting and rejoining, of nucleic acid sequences to form constellations different from those found in nature. The term recombinant refers to a cell, nucleic acid, protein or vector that has been modified from its native state. Thus, for example, recombinant cells express genes that are not found within the native (non-recombinant) form of the cell, or express native genes at different levels or under different conditions than found in nature. The term “recombinant” is synonymous with “genetically modified” and “transgenic”.

[0070] As used herein, the terms “recover” and “recovery” refer to the removal of a protein from at least one fermentation broth component selected from the list of a cell, a nucleic acid, or other specified material, e.g., recovery of the protein from the whole fermentation broth, or from the cell-free fermentation broth, by protein crystal harvest, by filtration, e.g. depth filtration (by use of filter aids or packed filter medias, cloth filtration in chamber filters, rotary-drum filtration, drum filtration, rotary vacuum-drum filters, candle filters, horizontal leaf filters or similar, using sheed or pad filtration in framed or modular setups) or membrane filtration (using sheet filtration, module filtration, candle filtration, microfiltration, ultrafiltration in either cross flow, dynamic cross flow or dead end operation), or by centrifugation (using decanter centrifuges, disc stack centrifuges, hydro cyclones or similar), or by precipitating the protein and using relevant solid-liquid separation methods to harvest the protein from the broth media by use of classification separation by particle sizes. Recovery encompasses isolation and/or purification of the protein.

[0071] As used herein, the relatedness between two amino acid sequences or between two nucleotide sequences is described by the parameter “sequence identity”.

[0072] For purposes of the present disclosure, the sequence identity between two amino acid sequences is determined as the output of “longest identity” using the Needleman-Wunsch algorithm (Needleman and Wunsch, 1970, J. Mol. Biol. 48: 443-453) as implemented in the Needle program of the EMBOSS package (EMBOSS: The European Molecular Biology Open Software Suite, Rice et al., 2000, Trends Genet. 16: 276-277), preferably version 6.6.0 or later. The parameters used are a gap open penalty of 10, a gap extension penalty of 0.5, and the EBLOSUM62 (EMBOSS version of BLOSUM62) substitution matrix. In order for the Needle program to report the longest identity, the −nobrief option must be specified in the command line. The output of Needle labeled “longest identity” is calculated as follows:

$$( Identical Residues \times 100 ) / ( Length of Alignment - Total Number of Gaps in Alignment )$$

[0073] For purposes of the present disclosure, the sequence identity between two polynucleotide sequences is determined as the output of “longest identity” using the Needleman-Wunsch algorithm (Needleman and Wunsch, 1970, supra) as implemented in the Needle program of the EMBOSS package (EMBOSS: The European Molecular Biology Open Software Suite, Rice et al., 2000, supra), preferably version 6.6.0 or later. The parameters used are a gap open penalty of 10, a gap extension penalty of 0.5, and the EDNAFULL (EMBOSS version of NCBI NUC4.4) substitution matrix. In order for the Needle program to report the longest identity, the nobrief option must be specified in the command line. The output of Needle labeled “longest identity” is calculated as follows:

$$( Identical Deoxyribonucleotides \times 100 ) / ( Length of Alignment - Total Number of Gaps in Alignment )$$

[0074] As used herein, the term “signal peptide” refers to a sequence of amino acids attached to the N-terminal portion of a protein, which facilitates the secretion of the protein outside the cell. The mature form of an extracellular protein lacks the signal peptide, which is cleaved off during the secretion process.

[0075] As used herein, the terms “stabilizing compound” and “stabilizer” refer to an agent or combination of agents the application of which enhances the stability of an enzyme.

[0076] As used herein, the term “subsequence” refers to a polynucleotide having one or more nucleotides absent from the 5′ and/or 3′ end of a mature protein coding sequence; wherein the subsequence encodes a fragment having enzymatic activity.

[0077] As used herein, the term “variant” refers to a protein comprising a man-made mutation, i.e., a substitution, insertion (including extension), and/or deletion (e.g., truncation), at one or more positions. A substitution means replacement of the amino acid occupying a position with a different amino acid; a deletion means removal of the amino acid occupying a position; and an insertion means adding 1-5 amino acids (e.g., 1-3 amino acids, in particular, 1 amino acid) adjacent to and immediately following the amino acid occupying a position.

[0078] As used herein, the term “wild-type” in reference to an amino acid sequence or nucleic acid sequence means that the amino acid sequence or nucleic acid sequence is a native or naturally occurring sequence.

[0079] While certain aspects of the present disclosure will hereinafter be described with reference to embodiments thereof, it will be understood by those of ordinary skill in the art that various changes in form and details may be made therein without departing from the spirit and scope of the present disclosure as defined by the claims.

[0080] All publications, patent applications, patents and other references mentioned herein are incorporated by reference in their entirety, except insofar as they contradict any disclosure expressly set forth herein.

[0081] The present disclosure provides proteins useful for preventing, treating, suppressing, eliminating and/or reducing the severity of infestations/infections of/by various pests, including, but not limited to, horticultural pests, such as acarids, bacteria, fungi, gastropods, insects, nematodes, oomycetes, protozoa and weeds, as well as formulations comprising such proteins, polynucleotides encoding such proteins, organisms expressing such proteins, and methods of using such proteins, formulations, polynucleotides and organisms in agriculture and other fields of endeavor.

[0082] The present disclosure encompasses proteins having one or more catalytic activities, including, but not limited to, proteins capable of exhibiting one or more catalytic activities belonging to Enzyme Commission classification number 1 (EC 1), Enzyme Commission classification number 3 (EC 3) and/or Enzyme Commission classification number 4 (EC 4).

[0083] In some embodiments, proteins of the present disclosure exhibit one or more catalytic activities belonging to EC 1. For example, in some embodiments, proteins of the present disclosure exhibit glucose oxidase, cellobiose dehydrogenase, laccase, catalase and/or peroxidase activity useful for preventing, treating, suppressing, eliminating and/or reducing the severity of infestations/infections of/by pests, such as acarids, bacteria, fungi, gastropods, insects, nematodes, oomycetes and protozoa.

[0084] In some embodiments, proteins of the present disclosure exhibit oxidoreductase activity belonging to EC 1 and, optionally, comprise, consist essentially of, or consist of an amino acid sequence that is about/at least 60, 61, 62, 63, 64, 65, 66, 67, 68, 69, 70, 71, 72, 73, 74, 75, 76, 77, 78, 79, 80, 81, 82, 83, 84, 85, 86, 87, 88, 89, 90, 91, 92, 93, 94, 95, 96, 97, 98, 99 or 100% identical to one or more of the amino acid sequences set forth herein as SEQ ID NOs: 1-12.

[0085] In some embodiments, proteins of the present disclosure exhibit one or more oxidoreductase activities belonging to EC 1.1, such as oxidase activities belonging to EC 1.1.3 (e.g., glucose oxidase activity belonging to EC 1.1.3.4 and/or cellobiose dehydrogenase activity belonging to EC 1.1.3.25).

[0086] In some embodiments, proteins of the present disclosure exhibit oxidoreductase activity belonging to EC 1.1 and, optionally, comprise, consist essentially of, or consist of an amino acid sequence that is about/at least 60, 61, 62, 63, 64, 65, 66, 67, 68, 69, 70, 71, 72, 73, 74, 75, 76, 77, 78, 79, 80, 81, 82, 83, 84, 85, 86, 87, 88, 89, 90, 91, 92, 93, 94, 95, 96, 97, 98, 99 or 100% identical to one or more of the amino acid sequences set forth herein as SEQ ID NOs: 1-8.

[0087] In some embodiments, proteins of the present disclosure exhibit oxidase activity belonging to EC 1.1.3 and, optionally, comprise, consist essentially of, or consist of an amino acid sequence that is about/at least 60, 61, 62, 63, 64, 65, 66, 67, 68, 69, 70, 71, 72, 73, 74, 75, 76, 77, 78, 79, 80, 81, 82, 83, 84, 85, 86, 87, 88, 89, 90, 91, 92, 93, 94, 95, 96, 97, 98, 99 or 100% identical to one or more of the amino acid sequences set forth herein as SEQ ID NOs: 1-8.

[0088] In some embodiments, proteins of the present disclosure exhibit glucose oxidase activity belonging to EC 1.1.3.4 and, optionally, comprise, consist essentially of, or consist of an amino acid sequence that is about/at least 60, 61, 62, 63, 64, 65, 66, 67, 68, 69, 70, 71, 72, 73, 74, 75, 76, 77, 78, 79, 80, 81, 82, 83, 84, 85, 86, 87, 88, 89, 90, 91, 92, 93, 94, 95, 96, 97, 98, 99 or 100% identical to one or more of the amino acid sequences set forth herein as SEQ ID NOs: 1-5.

[0089] In some embodiments, proteins of the present disclosure exhibit cellobiose dehydrogenase activity belonging to EC 1.1.3.25 (now included in EC 1.1.99.18) and, optionally comprise, consist essentially of, or consist of an amino acid sequence that is about/at least 60, 61, 62, 63, 64, 65, 66, 67, 68, 69, 70, 71, 72, 73, 74, 75, 76, 77, 78, 79, 80, 81, 82, 83, 84, 85, 86, 87, 88, 89, 90, 91, 92, 93, 94, 95, 96, 97, 98, 99 or 100% identical to one or more of the amino acid sequences set forth herein as SEQ ID NOs: 6-8.

[0090] In some embodiments, proteins of the present disclosure exhibit one or more oxidoreductase activities belonging to EC 1.10, such as activities belonging to EC 1.10.3 (e.g., laccase activity belonging to EC 1.10.3.2).

[0091] In some embodiments, proteins of the present disclosure exhibit oxidase activity belonging to EC 1.10 and, optionally, comprise, consist essentially of, or consist of an amino acid sequence that is about/at least 60, 61, 62, 63, 64, 65, 66, 67, 68, 69, 70, 71, 72, 73, 74, 75, 76, 77, 78, 79, 80, 81, 82, 83, 84, 85, 86, 87, 88, 89, 90, 91, 92, 93, 94, 95, 96, 97, 98, 99 or 100% identical to the amino acid sequences set forth herein as SEQ ID NO: 9.

[0092] In some embodiments, proteins of the present disclosure exhibit oxidase activity belonging to EC 1.10.3 and, optionally, comprise, consist essentially of, or consist of an amino acid sequence that is about/at least 60, 61, 62, 63, 64, 65, 66, 67, 68, 69, 70, 71, 72, 73, 74, 75, 76, 77, 78, 79, 80, 81, 82, 83, 84, 85, 86, 87, 88, 89, 90, 91, 92, 93, 94, 95, 96, 97, 98, 99 or 100% identical to the amino acid sequences set forth herein as SEQ ID NO: 9.

[0093] In some embodiments, proteins of the present disclosure exhibit laccase activity belonging to EC 1.10.3.2 and, optionally, comprise, consist essentially of, or consist of an amino acid sequence that is about/at least 60, 61, 62, 63, 64, 65, 66, 67, 68, 69, 70, 71, 72, 73, 74, 75, 76, 77, 78, 79, 80, 81, 82, 83, 84, 85, 86, 87, 88, 89, 90, 91, 92, 93, 94, 95, 96, 97, 98, 99 or 100% identical to the amino acid sequences set forth herein as SEQ ID NO: 9.

[0094] In some embodiments, proteins of the present disclosure exhibit one or more oxidoreductase activities belonging to EC 1.11, such as peroxidase activities belonging to EC 1.11.1 (e.g., catalase activity belonging to EC 1.11.1.6 and/or peroxidase activity belonging to 1.11.1.7).

[0095] In some embodiments, enzymes of the present disclosure exhibit peroxidase activity belonging to EC 1.11 and, optionally, comprise, consist essentially of, or consist of an amino acid sequence that is about/at least 60, 61, 62, 63, 64, 65, 66, 67, 68, 69, 70, 71, 72, 73, 74, 75, 76, 77, 78, 79, 80, 81, 82, 83, 84, 85, 86, 87, 88, 89, 90, 91, 92, 93, 94, 95, 96, 97, 98, 99 or 100% identical to one or more of the amino acid sequences set forth herein as SEQ ID NOs: 10-12.

[0096] In some embodiments, proteins of the present disclosure exhibit peroxidase activity belonging to EC 1.11.1 and, optionally, comprise, consist essentially of, or consist of an amino acid sequence that is about/at least 60, 61, 62, 63, 64, 65, 66, 67, 68, 69, 70, 71, 72, 73, 74, 75, 76, 77, 78, 79, 80, 81, 82, 83, 84, 85, 86, 87, 88, 89, 90, 91, 92, 93, 94, 95, 96, 97, 98, 99 or 100% identical to one or more of the amino acid sequences set forth herein as SEQ ID NOs: 10-12.

[0097] In some embodiments, proteins of the present disclosure exhibit catalase activity belonging to EC 1.11.1.6 and, optionally, comprise, consist essentially of, or consist of an amino acid sequence that is about/at least 60, 61, 62, 63, 64, 65, 66, 67, 68, 69, 70, 71, 72, 73, 74, 75, 76, 77, 78, 79, 80, 81, 82, 83, 84, 85, 86, 87, 88, 89, 90, 91, 92, 93, 94, 95, 96, 97, 98, 99 or 100% identical to one or more of the amino acid sequences set forth herein as SEQ ID NOs: 10-11.

[0098] In some embodiments, proteins of the present disclosure exhibit peroxidase activity belonging to EC 1.11.1.7 and, optionally, comprise, consist essentially of, or consist of an amino acid sequence that is about/at least 60, 61, 62, 63, 64, 65, 66, 67, 68, 69, 70, 71, 72, 73, 74, 75, 76, 77, 78, 79, 80, 81, 82, 83, 84, 85, 86, 87, 88, 89, 90, 91, 92, 93, 94, 95, 96, 97, 98, 99 or 100% identical to the amino acid sequences set forth herein as SEQ ID NO: 12.

[0099] In some embodiments, proteins of the present disclosure exhibit one or more oxygenase activities belonging to EC 1.14, such as oxygenase activities belonging to 1.14.99 (e.g., lytic cellulose monooxygenase activity belonging to EC 1.14.99.56).

[0100] In some embodiments, proteins of the present disclosure exhibit oxygenase activity belonging to EC 1.14 and, optionally, comprise, consist essentially of, or consist of an amino acid sequence that is about/at least 60, 61, 62, 63, 64, 65, 66, 67, 68, 69, 70, 71, 72, 73, 74, 75, 76, 77, 78, 79, 80, 81, 82, 83, 84, 85, 86, 87, 88, 89, 90, 91, 92, 93, 94, 95, 96, 97, 98, 99 or 100% identical to one or more of the amino acid sequences set forth herein as SEQ ID NOs: 98-99.

[0101] In some embodiments, proteins of the present disclosure exhibit oxygenase activity belonging to EC 1.14.99 and, optionally, comprise, consist essentially of, or consist of an amino acid sequence that is about/at least 60, 61, 62, 63, 64, 65, 66, 67, 68, 69, 70, 71, 72, 73, 74, 75, 76, 77, 78, 79, 80, 81, 82, 83, 84, 85, 86, 87, 88, 89, 90, 91, 92, 93, 94, 95, 96, 97, 98, 99 or 100% identical to one or more of the amino acid sequences set forth herein as SEQ ID NOs: 98-99.

[0102] In some embodiments, proteins of the present disclosure exhibit lytic cellulose monooxygenase activity belonging to EC 1.14.99.56 and, optionally, comprise, consist essentially of, or consist of an amino acid sequence that is about/at least 60, 61, 62, 63, 64, 65, 66, 67, 68, 69, 70, 71, 72, 73, 74, 75, 76, 77, 78, 79, 80, 81, 82, 83, 84, 85, 86, 87, 88, 89, 90, 91, 92, 93, 94, 95, 96, 97, 98, 99 or 100% identical to one or more of the amino acid sequences set forth herein as SEQ ID NOs: 98-99.

[0103] In some embodiments, proteins of the present disclosure exhibit one or more catalytic activities belonging to EC 3. For example, in some embodiments, proteins of the present disclosure exhibit lipase, triacylglycerol lipase, pectinesterase, phospholipase, lysophospholipase, amylase, glucosidase, galactosidase, cellulase, glucanase, xylanase, ceramidase, dextranase, chitinase, chitosanase, galacturonase, fucosidase, lysozymes, xylosidase, lucosidass, pullulanase, mannosidase, amidase, asparaginase, aminidase, maltohydrolases, cellobiosidase, pectinase, aminopeptidase, serine peptidase and/or metallopeptidase activity useful for preventing, treating, suppressing, eliminating and/or reducing the severity of infestations/infections of/by pests, such as acarids, bacteria, fungi, gastropods, insects, nematodes, oomycetes and protozoa.

[0104] In some embodiments, proteins of the present disclosure exhibit esterase activity belonging to EC 3 and, optionally, comprise, consist essentially of, or consist of an amino acid sequence that is about/at least 60, 61, 62, 63, 64, 65, 66, 67, 68, 69, 70, 71, 72, 73, 74, 75, 76, 77, 78, 79, 80, 81, 82, 83, 84, 85, 86, 87, 88, 89, 90, 91, 92, 93, 94, 95, 96, 97, 98, 99 or 100% identical to one or more of the amino acid sequences set forth herein as SEQ ID NOs: 13-48, 100-148 and 150.

[0105] In some embodiments, proteins of the present disclosure exhibit one or more esterase activities belonging to EC 3.1, such as lipase activities belonging to EC 3.1.1 (e.g., triacylglycerol lipase activity belong to EC 3.1.1.3, lysophospholipase activity belonging to 3.1.1.5, pectinesterase activity belonging to 3.1.1.11, and/or phospholipase activity belonging to 3.1.1.32) and hydrolase activities belonging to EC 3.1.4 (e.g., phospholipase C activity belonging to 3.1.4.3 and/or phoshoinositide phospholipase C activity belonging to 3.1.4.11).

[0106] In some embodiments, proteins of the present disclosure exhibit esterase activity belonging to EC 3.1 and, optionally, comprise, consist essentially of, or consist of an amino acid sequence that is about/at least 60, 61, 62, 63, 64, 65, 66, 67, 68, 69, 70, 71, 72, 73, 74, 75, 76, 77, 78, 79, 80, 81, 82, 83, 84, 85, 86, 87, 88, 89, 90, 91, 92, 93, 94, 95, 96, 97, 98, 99 or 100% identical to one or more of the amino acid sequences set forth herein as SEQ ID NO: 13 and 100-108.

[0107] In some embodiments, proteins of the present disclosure exhibit esterase activity belonging to EC 3.1.1 and, optionally, comprise, consist essentially of, or consist of an amino acid sequence that is about/at least 60, 61, 62, 63, 64, 65, 66, 67, 68, 69, 70, 71, 72, 73, 74, 75, 76, 77, 78, 79, 80, 81, 82, 83, 84, 85, 86, 87, 88, 89, 90, 91, 92, 93, 94, 95, 96, 97, 98, 99 or 100% identical to one or more of the amino acid sequences set forth herein as SEQ ID NO: 13 and 100-106.

[0108] In some embodiments, proteins of the present disclosure exhibit triacylglycerol lipase activity belonging to EC 3.1.1.3 and, optionally, comprise, consist essentially of, or consist of an amino acid sequence that is about/at least 60, 61, 62, 63, 64, 65, 66, 67, 68, 69, 70, 71, 72, 73, 74, 75, 76, 77, 78, 79, 80, 81, 82, 83, 84, 85, 86, 87, 88, 89, 90, 91, 92, 93, 94, 95, 96, 97, 98, 99 or 100% identical to one or more of the amino acid sequences set forth herein as SEQ ID NO: 100-103.

[0109] In some embodiments, proteins of the present disclosure exhibit lysophospholipase activity belonging to EC 3.1.1.5 and, optionally, comprise, consist essentially of, or consist of an amino acid sequence that is about/at least 60, 61, 62, 63, 64, 65, 66, 67, 68, 69, 70, 71, 72, 73, 74, 75, 76, 77, 78, 79, 80, 81, 82, 83, 84, 85, 86, 87, 88, 89, 90, 91, 92, 93, 94, 95, 96, 97, 98, 99 or 100% identical to one or more of the amino acid sequences set forth herein as SEQ ID NO: 13 and 104.

[0110] In some embodiments, proteins of the present disclosure exhibit pectinesterase activity belonging to EC 3.1.1.11 and, optionally, comprise, consist essentially of, or consist of an amino acid sequence that is about/at least 60, 61, 62, 63, 64, 65, 66, 67, 68, 69, 70, 71, 72, 73, 74, 75, 76, 77, 78, 79, 80, 81, 82, 83, 84, 85, 86, 87, 88, 89, 90, 91, 92, 93, 94, 95, 96, 97, 98, 99 or 100% identical to one or more of the amino acid sequences set forth herein as SEQ ID NO: 100-103.

[0111] In some embodiments, proteins of the present disclosure exhibit phospholipase A₁ activity belonging to EC 3.1.1.32 and, optionally, comprise, consist essentially of, or consist of an amino acid sequence that is about/at least 60, 61, 62, 63, 64, 65, 66, 67, 68, 69, 70, 71, 72, 73, 74, 75, 76, 77, 78, 79, 80, 81, 82, 83, 84, 85, 86, 87, 88, 89, 90, 91, 92, 93, 94, 95, 96, 97, 98, 99 or 100% identical to one or more of the amino acid sequences set forth herein as SEQ ID NO: 100-103.

[0112] In some embodiments, proteins of the present disclosure exhibit one or more glycosylase activities belonging to EC 3.2, such as glycosidase activities belonging to EC 3.2.1 (e.g., alpha-amylase activity belong to EC 3.2.1.1, beta-amylase activity belong to EC 3.2.1.2, glucan 1,4-alpha-glucosidase activity belong to 3.2.1.3, cellulase activity belong to 3.2.1.4, endo-1,3(4)-beta-glucanase activity belong to 3.2.1.6, inulinase activity belong to 3.2.1.7, endo-1,4-beta-xylanase activity belong to 3.2.1.8, oligo-1,6-glucosidase activity belong to 3.2.1.10, dextranase activity belong to 3.2.1.11, chitinase activity belong to 3.2.1.14, endo-polygalacturonase (pectinase) activity belong to 3.2.1.15, lysozyme activity belong to 3.2.1.17, alpha-glucosidase activity belong to 3.2.1.20, beta-glucosidase activity belong to 3.2.1.21, alpha-galactosidase activity belong to 3.2.1.22, beta-galactosidase activity belong to 3.2.1.23, alpha-mannosidase activity belong to 3.2.1.24, beta-mannosidase activity belong to 3.2.1.25, beta-fructofuranoside activity belong to 3.2.1.26, alpha,alpha-trehalase activity belong to 3.2.1.28, endo-1,3-beta-xylanase activity belong to 3.2.1.32, xylan 1,4-beta-xylosidase activity belong to 3.2.1.37, glucan endo-1,3-beta-D-glucosidase activity belong to 3.2.1.39, pullulanase activity belong to 3.2.1.41, alpha-L-arabinofuranosidase activity belong to 3.2.1.55, glucan 1,3-beta-glucosidase activity belong to 3.2.1.58, glucan endo-1,3-alpha-glucosidase activity belong to 3.2.1.59, licheninase activity belong to 3.2.1.73, glucan endo-1,6-beta-glucosidase activity belong to 3.2.1.75, mannan endo-1,4-$-mannosidase activity belonging to 3.2.1.78, 1,4-beta-cellobiosidase activity belong to 3.2.1.91, endo-alpha-N-acetylgalactosaminidase activity belong to 3.2.1.97, mannan endo-1,6-alpha-mannosidase activity belong to 3.2.1.101, endogalactosaminidase activity belong to 3.2.1.109, 1,3-alpha-L-fucosidase activity belong to 3.2.1.111, 2-deoxyglucosidase activity belong to 3.2.1.112, chitosanase activity belong to 3.2.1.132, glucan 1,4-alpha-maltohydrolase activity belong to 3.2.1.133, and/or 1,4-beta-cellobiosidase activity belonging to 3.2.1.176).

[0113] In some embodiments, proteins of the present disclosure exhibit glycosylase activity belonging to EC 3.2 and, optionally, comprise, consist essentially of, or consist of an amino acid sequence that is about/at least 60, 61, 62, 63, 64, 65, 66, 67, 68, 69, 70, 71, 72, 73, 74, 75, 76, 77, 78, 79, 80, 81, 82, 83, 84, 85, 86, 87, 88, 89, 90, 91, 92, 93, 94, 95, 96, 97, 98, 99 or 100% identical to one or more of the amino acid sequences set forth herein as SEQ ID NOs: 14-41 and 109-143.

[0114] In some embodiments, proteins of the present disclosure exhibit glycosidase activity belonging to EC 3.2.1 and, optionally, comprise, consist essentially of, or consist of an amino acid sequence that is about/at least 60, 61, 62, 63, 64, 65, 66, 67, 68, 69, 70, 71, 72, 73, 74, 75, 76, 77, 78, 79, 80, 81, 82, 83, 84, 85, 86, 87, 88, 89, 90, 91, 92, 93, 94, 95, 96, 97, 98, 99 or 100% identical to one or more of the amino acid sequences set forth herein as SEQ ID NOs: 14-41 and 109-143.

[0115] In some embodiments, proteins of the present disclosure exhibit alpha-amylase activity belonging to EC 3.2.1.1 and, optionally, comprise, consist essentially of, or consist of an amino acid sequence that is about/at least 60, 61, 62, 63, 64, 65, 66, 67, 68, 69, 70, 71, 72, 73, 74, 75, 76, 77, 78, 79, 80, 81, 82, 83, 84, 85, 86, 87, 88, 89, 90, 91, 92, 93, 94, 95, 96, 97, 98, 99 or 100% identical to one or more of the amino acid sequences set forth herein as SEQ ID NOs: 14-16 and 109-113.

[0116] In some embodiments, proteins of the present disclosure exhibit glucan 1,4-alpha-glucosidase activity belonging to EC 3.2.1.3 and, optionally, comprise, consist essentially of, or consist of an amino acid sequence that is about/at least 60, 61, 62, 63, 64, 65, 66, 67, 68, 69, 70, 71, 72, 73, 74, 75, 76, 77, 78, 79, 80, 81, 82, 83, 84, 85, 86, 87, 88, 89, 90, 91, 92, 93, 94, 95, 96, 97, 98, 99 or 100% identical to one or more of the amino acid sequences set forth herein as SEQ ID NOs: 17-18.

[0117] In some embodiments, proteins of the present disclosure exhibit cellulase activity belonging to EC 3.2.1.4 and, optionally, comprise, consist essentially of, or consist of an amino acid sequence that is about/at least 60, 61, 62, 63, 64, 65, 66, 67, 68, 69, 70, 71, 72, 73, 74, 75, 76, 77, 78, 79, 80, 81, 82, 83, 84, 85, 86, 87, 88, 89, 90, 91, 92, 93, 94, 95, 96, 97, 98, 99 or 100% identical to one or more of the amino acid sequences set forth herein as SEQ ID NO: 19 and 114-116.

[0118] In some embodiments, proteins of the present disclosure exhibit endo-1,3(4)-beta-glucanase activity belonging to EC 3.2.1.6 and, optionally, comprise, consist essentially of, or consist of an amino acid sequence that is about/at least 60, 61, 62, 63, 64, 65, 66, 67, 68, 69, 70, 71, 72, 73, 74, 75, 76, 77, 78, 79, 80, 81, 82, 83, 84, 85, 86, 87, 88, 89, 90, 91, 92, 93, 94, 95, 96, 97, 98, 99 or 100% identical to one or more of the amino acid sequences set forth herein as SEQ ID NO: 20 and 150.

[0119] In some embodiments, proteins of the present disclosure exhibit inulinase activity belonging to EC 3.2.1.7 and, optionally, comprise, consist essentially of, or consist of an amino acid sequence that is about/at least 60, 61, 62, 63, 64, 65, 66, 67, 68, 69, 70, 71, 72, 73, 74, 75, 76, 77, 78, 79, 80, 81, 82, 83, 84, 85, 86, 87, 88, 89, 90, 91, 92, 93, 94, 95, 96, 97, 98, 99 or 100% identical to the amino acid sequence set forth herein as SEQ ID NO: 117.

[0120] In some embodiments, proteins of the present disclosure exhibit endo-1,4-beta-xylanase activity belonging to EC 3.2.1.8 and, optionally, comprise, consist essentially of, or consist of an amino acid sequence that is about/at least 60, 61, 62, 63, 64, 65, 66, 67, 68, 69, 70, 71, 72, 73, 74, 75, 76, 77, 78, 79, 80, 81, 82, 83, 84, 85, 86, 87, 88, 89, 90, 91, 92, 93, 94, 95, 96, 97, 98, 99 or 100% identical to one or more of the amino acid sequences set forth herein as SEQ ID NOs: 21-24 and 118-120.

[0121] In some embodiments, proteins of the present disclosure exhibit dextranase activity belonging to EC 3.2.1.11 and, optionally, comprise, consist essentially of, or consist of an amino acid sequence that is about/at least 60, 61, 62, 63, 64, 65, 66, 67, 68, 69, 70, 71, 72, 73, 74, 75, 76, 77, 78, 79, 80, 81, 82, 83, 84, 85, 86, 87, 88, 89, 90, 91, 92, 93, 94, 95, 96, 97, 98, 99 or 100% identical to the amino acid sequence set forth herein as SEQ ID NO: 25.

[0122] In some embodiments, proteins of the present disclosure exhibit chitinase activity belonging to EC 3.2.1.14 and, optionally, comprise, consist essentially of, or consist of an amino acid sequence that is about/at least 60, 61, 62, 63, 64, 65, 66, 67, 68, 69, 70, 71, 72, 73, 74, 75, 76, 77, 78, 79, 80, 81, 82, 83, 84, 85, 86, 87, 88, 89, 90, 91, 92, 93, 94, 95, 96, 97, 98, 99 or 100% identical to one or more of the amino acid sequences set forth herein as SEQ ID NOs: 121-124 and 141.

[0123] In some embodiments, proteins of the present disclosure exhibit endo-polygalacturonase (pectinase) activity belonging to EC 3.2.1.15 and, optionally, comprise, consist essentially of, or consist of an amino acid sequence that is about/at least 60, 61, 62, 63, 64, 65, 66, 67, 68, 69, 70, 71, 72, 73, 74, 75, 76, 77, 78, 79, 80, 81, 82, 83, 84, 85, 86, 87, 88, 89, 90, 91, 92, 93, 94, 95, 96, 97, 98, 99 or 100% identical to one or more of the amino acid sequences set forth herein as SEQ ID NO: 125.

[0124] In some embodiments, proteins of the present disclosure exhibit lysozyme activity belonging to EC 3.2.1.17 and, optionally, comprise, consist essentially of, or consist of an amino acid sequence that is about/at least 60, 61, 62, 63, 64, 65, 66, 67, 68, 69, 70, 71, 72, 73, 74, 75, 76, 77, 78, 79, 80, 81, 82, 83, 84, 85, 86, 87, 88, 89, 90, 91, 92, 93, 94, 95, 96, 97, 98, 99 or 100% identical to the amino acid sequence set forth herein as SEQ ID NO: 26.

[0125] In some embodiments, proteins of the present disclosure exhibit beta-glucosidase activity belonging to EC 3.2.1.21 and, optionally, comprise, consist essentially of, or consist of an amino acid sequence that is about/at least 60, 61, 62, 63, 64, 65, 66, 67, 68, 69, 70, 71, 72, 73, 74, 75, 76, 77, 78, 79, 80, 81, 82, 83, 84, 85, 86, 87, 88, 89, 90, 91, 92, 93, 94, 95, 96, 97, 98, 99 or 100% identical to the amino acid sequence set forth herein as SEQ ID NO: 126.

[0126] In some embodiments, proteins of the present disclosure exhibit xylan 1,4-beta-xylosidase activity belonging to EC 3.2.1.37 and, optionally, comprise, consist essentially of, or consist of an amino acid sequence that is about/at least 60, 61, 62, 63, 64, 65, 66, 67, 68, 69, 70, 71, 72, 73, 74, 75, 76, 77, 78, 79, 80, 81, 82, 83, 84, 85, 86, 87, 88, 89, 90, 91, 92, 93, 94, 95, 96, 97, 98, 99 or 100% identical to the amino acid sequence set forth herein as SEQ ID NO: 127.

[0127] In some embodiments, proteins of the present disclosure exhibit glucan endo-1,3-beta-D-glucosidase activity belonging to EC 3.2.1.39 and, optionally, comprise, consist essentially of, or consist of an amino acid sequence that is about/at least 60, 61, 62, 63, 64, 65, 66, 67, 68, 69, 70, 71, 72, 73, 74, 75, 76, 77, 78, 79, 80, 81, 82, 83, 84, 85, 86, 87, 88, 89, 90, 91, 92, 93, 94, 95, 96, 97, 98, 99 or 100% identical to one or more of the amino acid sequences set forth herein as SEQ ID NOs: 27-28 and 128.

[0128] In some embodiments, proteins of the present disclosure exhibit pullulanase activity belonging to EC 3.2.1.41 and, optionally, comprise, consist essentially of, or consist of an amino acid sequence that is about/at least 60, 61, 62, 63, 64, 65, 66, 67, 68, 69, 70, 71, 72, 73, 74, 75, 76, 77, 78, 79, 80, 81, 82, 83, 84, 85, 86, 87, 88, 89, 90, 91, 92, 93, 94, 95, 96, 97, 98, 99 or 100% identical to the amino acid sequence set forth herein as SEQ ID NO: 29.

[0129] In some embodiments, proteins of the present disclosure exhibit alpha-L-arabinofuranosidase activity belonging to EC 3.2.1.55 and, optionally, comprise, consist essentially of, or consist of an amino acid sequence that is about/at least 60, 61, 62, 63, 64, 65, 66, 67, 68, 69, 70, 71, 72, 73, 74, 75, 76, 77, 78, 79, 80, 81, 82, 83, 84, 85, 86, 87, 88, 89, 90, 91, 92, 93, 94, 95, 96, 97, 98, 99 or 100% identical to the amino acid sequence set forth herein as SEQ ID NO: 129.

[0130] In some embodiments, proteins of the present disclosure exhibit glucan endo-1,3-alpha-glucosidase activity belonging to EC 3.2.1.59 and, optionally, comprise, consist essentially of, or consist of an amino acid sequence that is about/at least 60, 61, 62, 63, 64, 65, 66, 67, 68, 69, 70, 71, 72, 73, 74, 75, 76, 77, 78, 79, 80, 81, 82, 83, 84, 85, 86, 87, 88, 89, 90, 91, 92, 93, 94, 95, 96, 97, 98, 99 or 100% identical to one or more of the amino acid sequences set forth herein as SEQ ID NOs: 30 and 130-131.

[0131] In some embodiments, proteins of the present disclosure exhibit licheninase activity belonging to EC 3.2.1.73 and, optionally, comprise, consist essentially of, or consist of an amino acid sequence that is about/at least 60, 61, 62, 63, 64, 65, 66, 67, 68, 69, 70, 71, 72, 73, 74, 75, 76, 77, 78, 79, 80, 81, 82, 83, 84, 85, 86, 87, 88, 89, 90, 91, 92, 93, 94, 95, 96, 97, 98, 99 or 100% identical to one or more of the amino acid sequences set forth herein as SEQ ID NO: 132.

[0132] In some embodiments, proteins of the present disclosure exhibit glucan endo-1,6-beta-glucosidase activity belonging to EC 3.2.1.75 and, optionally, comprise, consist essentially of, or consist of an amino acid sequence that is about/at least 60, 61, 62, 63, 64, 65, 66, 67, 68, 69, 70, 71, 72, 73, 74, 75, 76, 77, 78, 79, 80, 81, 82, 83, 84, 85, 86, 87, 88, 89, 90, 91, 92, 93, 94, 95, 96, 97, 98, 99 or 100% identical to one or more of the amino acid sequences set forth herein as SEQ ID NOs: 31-32 and 133.

[0133] In some embodiments, proteins of the present disclosure exhibit mannan endo-1,4-beta-mannosidase activity belonging to EC 3.2.1.78 and, optionally, comprise, consist essentially of, or consist of an amino acid sequence that is about/at least 60, 61, 62, 63, 64, 65, 66, 67, 68, 69, 70, 71, 72, 73, 74, 75, 76, 77, 78, 79, 80, 81, 82, 83, 84, 85, 86, 87, 88, 89, 90, 91, 92, 93, 94, 95, 96, 97, 98, 99 or 100% identical to one or more of the amino acid sequences set forth herein as SEQ ID NOs: 33 and 134.

[0134] In some embodiments, proteins of the present disclosure exhibit 1,4-beta-cellobiosidase activity belonging to EC 3.2.1.91 and, optionally, comprise, consist essentially of, or consist of an amino acid sequence that is about/at least 60, 61, 62, 63, 64, 65, 66, 67, 68, 69, 70, 71, 72, 73, 74, 75, 76, 77, 78, 79, 80, 81, 82, 83, 84, 85, 86, 87, 88, 89, 90, 91, 92, 93, 94, 95, 96, 97, 98, 99 or 100% identical to the amino acid sequences set forth herein as SEQ ID NO: 135.

[0135] In some embodiments, proteins of the present disclosure exhibit mannan endo-1,6-alpha-mannosidase activity belonging to EC 3.2.1.101 and, optionally, comprise, consist essentially of, or consist of an amino acid sequence that is about/at least 60, 61, 62, 63, 64, 65, 66, 67, 68, 69, 70, 71, 72, 73, 74, 75, 76, 77, 78, 79, 80, 81, 82, 83, 84, 85, 86, 87, 88, 89, 90, 91, 92, 93, 94, 95, 96, 97, 98, 99 or 100% identical to one or more of the amino acid sequences set forth herein as SEQ ID NOs: 34 and 136.

[0136] In some embodiments, proteins of the present disclosure exhibit endogalactosaminidase activity belonging to EC 3.2.1.109 and, optionally, comprise, consist essentially of, or consist of an amino acid sequence that is about/at least 60, 61, 62, 63, 64, 65, 66, 67, 68, 69, 70, 71, 72, 73, 74, 75, 76, 77, 78, 79, 80, 81, 82, 83, 84, 85, 86, 87, 88, 89, 90, 91, 92, 93, 94, 95, 96, 97, 98, 99 or 100% identical to one or more of the amino acid sequences set forth herein as SEQ ID NOs: 35-40 and 137-138.

[0137] In some embodiments, proteins of the present disclosure exhibit chitosanase activity belonging to EC 3.2.1.132 and, optionally, comprise, consist essentially of, or consist of an amino acid sequence that is about/at least 60, 61, 62, 63, 64, 65, 66, 67, 68, 69, 70, 71, 72, 73, 74, 75, 76, 77, 78, 79, 80, 81, 82, 83, 84, 85, 86, 87, 88, 89, 90, 91, 92, 93, 94, 95, 96, 97, 98, 99 or 100% identical to one or more of the amino acid sequences set forth herein as SEQ ID NOs: 139-140.

[0138] In some embodiments, proteins of the present disclosure exhibit glucan 1,4-alpha-maltohydrolase activity belonging to EC 3.2.1.133 and, optionally, comprise, consist essentially of, or consist of an amino acid sequence that is about/at least 60, 61, 62, 63, 64, 65, 66, 67, 68, 69, 70, 71, 72, 73, 74, 75, 76, 77, 78, 79, 80, 81, 82, 83, 84, 85, 86, 87, 88, 89, 90, 91, 92, 93, 94, 95, 96, 97, 98, 99 or 100% identical to the amino acid sequences set forth herein as SEQ ID NO: 41.

[0139] In some embodiments, proteins of the present disclosure exhibit 1,4-beta-cellobiosidase activity belonging to EC 3.2.1.176 and, optionally, comprise, consist essentially of, or consist of an amino acid sequence that is about/at least 60, 61, 62, 63, 64, 65, 66, 67, 68, 69, 70, 71, 72, 73, 74, 75, 76, 77, 78, 79, 80, 81, 82, 83, 84, 85, 86, 87, 88, 89, 90, 91, 92, 93, 94, 95, 96, 97, 98, 99 or 100% identical to one or more of the amino acid sequences set forth herein as SEQ ID NOs: 142-143.

[0140] In some embodiments, proteins of the present disclosure exhibit one or more peptidase activities belonging to EC 3.4, such as aminopeptidase activities belonging to EC 3.4.11 (e.g., leucyl aminopeptidase activity belong to EC 3.4.11.1), serine endopeptidase activities belonging to EC 3.4.21 (e.g., glutamyl endopeptidase activity belonging to EC 3.4.21.19 and/or subtilisin activity belonging to 3.4.21.62) and metalloendopeptidase activity belonging to EC 3.4.24 (e.g., bacillolysin activity belonging to EC 3.4.24.28).

[0141] In some embodiments, proteins of the present disclosure exhibit peptidase activity belonging to EC 3.4 and, optionally, comprise, consist essentially of, or consist of an amino acid sequence that is about/at least 60, 61, 62, 63, 64, 65, 66, 67, 68, 69, 70, 71, 72, 73, 74, 75, 76, 77, 78, 79, 80, 81, 82, 83, 84, 85, 86, 87, 88, 89, 90, 91, 92, 93, 94, 95, 96, 97, 98, 99 or 100% identical to one or more of the amino acid sequences set forth herein as SEQ ID NOs: 42-48.

[0142] In some embodiments, proteins of the present disclosure exhibit serine endoprotease activity belonging to EC 3.4.21 and, optionally, comprise, consist essentially of, or consist of an amino acid sequence that is about/at least 60, 61, 62, 63, 64, 65, 66, 67, 68, 69, 70, 71, 72, 73, 74, 75, 76, 77, 78, 79, 80, 81, 82, 83, 84, 85, 86, 87, 88, 89, 90, 91, 92, 93, 94, 95, 96, 97, 98, 99 or 100% identical to one or more of the amino acid sequences set forth herein as SEQ ID NOs: 42-48 and 144-145.

[0143] In some embodiments, proteins of the present disclosure exhibit glutamyl endoprotease activity belonging to EC 3.4.21.19 and, optionally, comprise, consist essentially of, or consist of an amino acid sequence that is about/at least 60, 61, 62, 63, 64, 65, 66, 67, 68, 69, 70, 71, 72, 73, 74, 75, 76, 77, 78, 79, 80, 81, 82, 83, 84, 85, 86, 87, 88, 89, 90, 91, 92, 93, 94, 95, 96, 97, 98, 99 or 100% identical to the amino acid sequence set forth herein as SEQ ID NO: 43.

[0144] In some embodiments, proteins of the present disclosure exhibit subtilisin activity belonging to EC 3.4.21.62 and, optionally, comprise, consist essentially of, or consist of an amino acid sequence that is about/at least 60, 61, 62, 63, 64, 65, 66, 67, 68, 69, 70, 71, 72, 73, 74, 75, 76, 77, 78, 79, 80, 81, 82, 83, 84, 85, 86, 87, 88, 89, 90, 91, 92, 93, 94, 95, 96, 97, 98, 99 or 100% identical to one or more of the amino acid sequences set forth herein as SEQ ID NOs: 44-47 and 145.

[0145] In some embodiments, proteins of the present disclosure exhibit metalloendopeptidase activity belonging to EC 3.4.24 and, optionally, comprise, consist essentially of, or consist of an amino acid sequence that is about/at least 60, 61, 62, 63, 64, 65, 66, 67, 68, 69, 70, 71, 72, 73, 74, 75, 76, 77, 78, 79, 80, 81, 82, 83, 84, 85, 86, 87, 88, 89, 90, 91, 92, 93, 94, 95, 96, 97, 98, 99 or 100% identical to the amino acid sequences set forth herein as SEQ ID NO: 48.

[0146] In some embodiments, proteins of the present disclosure exhibit bacillolysin activity belonging to EC 3.4.24.28 and, optionally, comprise, consist essentially of, or consist of an amino acid sequence that is about/at least 60, 61, 62, 63, 64, 65, 66, 67, 68, 69, 70, 71, 72, 73, 74, 75, 76, 77, 78, 79, 80, 81, 82, 83, 84, 85, 86, 87, 88, 89, 90, 91, 92, 93, 94, 95, 96, 97, 98, 99 or 100% identical to the amino acid sequences set forth herein as SEQ ID NO: 48.

[0147] In some embodiments, proteins of the present disclosure exhibit one or more hydrolase activities belonging to EC 3.5, such as amidohydrolase and amidase activities belonging to EC 3.5.1 (e.g., asparaginase activity belong to EC 3.5.1.1, glutaminase activities belonging to 3.5.1.2, amidase activities belonging to 3.5.1.4, urease activities belonging to 3.5.1.5, biotinidase activities belonging to 3.5.1.12, nicotinamidase activities belonging to 3.5.1.19, D-glutaminase activities belonging to 3.5.1.35, glutamin-(asparagin-)ase activities belonging to 3.5.1.38, chitin deacetylase activities belonging to 3.5.1.41, peptidyl-glutaminase activities belonging to 3.5.1.43, protein-glutamine glutaminase activities belonging to 3.5.1.44, pentanamidase activities belonging to 3.5.1.50).

[0148] In some embodiments, proteins of the present disclosure exhibit hydrolase activity belonging to EC 3.5 and, optionally, comprise, consist essentially of, or consist of an amino acid sequence that is about/at least 60, 61, 62, 63, 64, 65, 66, 67, 68, 69, 70, 71, 72, 73, 74, 75, 76, 77, 78, 79, 80, 81, 82, 83, 84, 85, 86, 87, 88, 89, 90, 91, 92, 93, 94, 95, 96, 97, 98, 99 or 100% identical to one or more of the amino acid sequences set forth herein as SEQ ID NOs: 146-148.

[0149] In some embodiments, proteins of the present disclosure exhibit deacetylase activity belonging to EC 3.5.1 and, optionally, comprise, consist essentially of, or consist of an amino acid sequence that is about/at least 60, 61, 62, 63, 64, 65, 66, 67, 68, 69, 70, 71, 72, 73, 74, 75, 76, 77, 78, 79, 80, 81, 82, 83, 84, 85, 86, 87, 88, 89, 90, 91, 92, 93, 94, 95, 96, 97, 98, 99 or 100% identical to one or more of the amino acid sequences set forth herein as SEQ ID NOs: 42-48 and 146-148.

[0150] In some embodiments, proteins of the present disclosure exhibit asparaginase activity belonging to EC 3.5.1.1 and, optionally, comprise, consist essentially of, or consist of an amino acid sequence that is about/at least 60, 61, 62, 63, 64, 65, 66, 67, 68, 69, 70, 71, 72, 73, 74, 75, 76, 77, 78, 79, 80, 81, 82, 83, 84, 85, 86, 87, 88, 89, 90, 91, 92, 93, 94, 95, 96, 97, 98, 99 or 100% identical to the amino acid sequence set forth herein as SEQ ID NO: 148.

[0151] In some embodiments, proteins of the present disclosure exhibit one or more lyase activities belonging to EC 4. For example, in some embodiments, proteins of the present disclosure exhibit lyase activity useful for preventing, treating, suppressing, eliminating and/or reducing the severity of infestations/infections of/by pests, such as acarids, bacteria, fungi, gastropods, insects, nematodes, oomycetes and protozoa.

[0152] In some embodiments, proteins of the present disclosure exhibit one or more lyase activities belonging to EC 4.2, such as polysaccharide lyase activities belonging to EC 4.2.2 (e.g., pectate lyase activity belong to EC 4.2.2.2, pectin lyase activity belonging to EC 4.2.2.10, glucan lyase activity belonging to EC 4.2.2.13, gellan lyase activity belonging to EC 4.2.2.25, oligo-alginase lyase activity belonging to EC 4.2.2.26, pectin monosaccharide-lyase activity belonging to EC 4.2.2.27).

[0153] In some embodiments, proteins of the present disclosure exhibit lyase activity belonging to EC 4.2 and, optionally, comprise, consist essentially of, or consist of an amino acid sequence that is about/at least 60, 61, 62, 63, 64, 65, 66, 67, 68, 69, 70, 71, 72, 73, 74, 75, 76, 77, 78, 79, 80, 81, 82, 83, 84, 85, 86, 87, 88, 89, 90, 91, 92, 93, 94, 95, 96, 97, 98, 99 or 100% identical to the amino acid sequence set forth herein as SEQ ID NO: 149.

[0154] In some embodiments, proteins of the present disclosure exhibit polysaccharide lyase activity belonging to EC 4.2.2 and, optionally, comprise, consist essentially of, or consist of an amino acid sequence that is about/at least 60, 61, 62, 63, 64, 65, 66, 67, 68, 69, 70, 71, 72, 73, 74, 75, 76, 77, 78, 79, 80, 81, 82, 83, 84, 85, 86, 87, 88, 89, 90, 91, 92, 93, 94, 95, 96, 97, 98, 99 or 100% identical to the amino acid sequence set forth herein as SEQ ID NO: 149.

[0155] In some embodiments, proteins of the present disclosure exhibit pectate lyase activity belonging to EC 4.2.2.2 and, optionally, comprise, consist essentially of, or consist of an amino acid sequence that is about/at least 60, 61, 62, 63, 64, 65, 66, 67, 68, 69, 70, 71, 72, 73, 74, 75, 76, 77, 78, 79, 80, 81, 82, 83, 84, 85, 86, 87, 88, 89, 90, 91, 92, 93, 94, 95, 96, 97, 98, 99 or 100% identical to the amino acid sequence set forth herein as SEQ ID NO: 149.

[0156] It is to be understood that the present disclosure extends to proteins capable of exhibiting two, three, four, five or more distinct catalytic activities (e.g., a fusion protein comprising a first polypeptide having a first catalytic activity and a second polypeptide having a second catalytic activity).

[0157] It is to be further understood that proteins of the present disclosure needn't be toxic to be effective. As will be explained in further detail below, proteins of the present disclosure may exert their effects through various non-lethal means, such as reducing the attraction of a pest to a treated surface by degrading a food source, for example. Moreover, in many instances, otherwise toxic proteins of the present disclosure may be used in non-lethal doses to enhance the efficacy of and/or expand the target pest range of various chemical pesticides and biological pesticides.

[0158] Table 1 provides a non-exhaustive list of proteins useful for preventing, treating, suppressing, eliminating and/or reducing the severity of infestations/infections of/by one or more pests, such as acarids, bacteria, fungi, insects, nematodes, oomycetes and protozoa.

TABLE 1
Exemplary proteins of the present disclosure

| | | | Poly- | Poly- |
|---|---|---|---|---|
| | | | peptide | nucleotide |
| NZ | | | SEQ | SEQ |
| # | Enzyme Class | EC # | ID NO: | ID NO: |
| 1 | glucose oxidase | 1.1.3.4 | 1 | 49 |
| 2 | glucose oxidase | 1.1.3.4 | 2 | 50 |
| 3 | glucose oxidase | 1.1.3.4 | 3 | 51 |
| 4 | glucose oxidase | 1.1.3.4 | 4 | 52 |
| 5 | glucose oxidase | 1.1.3.4 | 5 | 53 |
| 6 | cellobiose oxidase | 1.1.3.25 | 6 | 54 |
| 7 | cellobiose oxidase | 1.1.3.25 | 7 | 55 |
| 8 | cellobiose oxidase | 1.1.3.25 | 8 | 56 |
| 9 | laccase | 1.10.3.2 | 9 | 57 |
| 10 | catalase | 1.11.1.6 | 10 | 58 |
| 11 | catalase | 1.11.1.6 | 11 | 59 |
| 11 | catalase | 1.11.1.6 | 11 | 60 |
| 12 | peroxidase | 1.11.1.7 | 12 | 61 |
| 99 | lytic cellulose monooxygenase | 1.14.99.56 | 99 | 152 |
| 100 | triacylglycerol lipase | 3.1.1.3 | 100 | 153 |
| 101 | triacylglycerol lipase | 3.1.1.3 | 101 | 154 |
| 102 | triacylglycerol lipase | 3.1.1.3 | 102 | 155 |
| 103 | triacylglycerol lipase | 3.1.1.3 | 103 | 156 |
| 13 | lysophospholipase | 3.1.1.5 | 13 | 62 |
| 105 | pectinesterase | 3.1.1.11 | 105 | 158 |
| 14 | alpha-amylase | 3.2.1.1 | 14 | 63 |
| 15 | alpha-amylase | 3.2.1.1 | 15 | 64 |
| 16 | alpha-amylase | 3.2.1.1 | 16 | 65 |
| 109 | alpha-amylase | 3.2.1.1 | 109 | 162 |
| 110 | alpha-amylase | 3.2.1.1 | 110 | 163 |
| 111 | alpha-amylase | 3.2.1.1 | 111 | 164 |
| 17 | glucan 1,4-alpha-glucosidase | 3.2.1.3 | 17 | 66 |
| 18 | glucan 1,4-alpha-glucosidase | 3.2.1.3 | 18 | 67 |
| 19 | cellulase | 3.2.1.4 | 19 | 68 |
| 114 | cellulase | 3.2.1.4 | 114 | 167 |
| 116 | cellulase | 3.2.1.4 | 116 | 169 |
| 20 | endo-1,3(4)-beta-glucanase | 3.2.1.6 | 20 | 69 |
| 117 | inulinase | 3.2.1.7 | 117 | 170 |
| 21 | endo-1,4-beta-xylanase | 3.2.1.8 | 21 | 70 |
| 22 | endo-1,4-beta-xylanase | 3.2.1.8 | 22 | 71 |
| 23 | endo-1,4-beta-xylanase | 3.2.1.8 | 23 | 72 |
| 24 | endo-1,4-beta-xylanase | 3.2.1.8 | 24 | 73 |
| 119 | endo-1,4-beta-xylanase | 3.2.1.8 | 119 | 172 |
| 25 | dextranase | 3.2.1.11 | 25 | 74 |
| 125 | endo-polygalacturonase | 3.2.1.15 | 125 | 178 |
| | (pectinase) | | | |
| 26 | lysozyme | 3.2.1.17 | 26 | 75 |
| 126 | beta-glucosidase | 3.2.1.21 | 126 | 179 |
| 27 | glucan endo-1,3-beta- | 3.2.1.39 | 27 | 76 |
| | glucosidase | | | |
| 28 | glucan endo-1,3-beta- | 3.2.1.39 | 28 | 77 |
| | glucosidase | | | |
| 29 | pullulanase | 3.2.1.41 | 29 | 78 |
| 129 | alpha-L-arabinofuranosidase | 3.2.1.55 | 129 | 182 |
| 30 | glucan endo-1,3-alpha- | 3.2.1.59 | 30 | 79 |
| | glucosidase | | | |
| 132 | licheninase | 3.2.1.73 | 132 | 185 |
| 31 | glucan endo-1,6-beta- | 3.2.1.75 | 31 | 80 |
| | glucosidase | | | |
| 32 | glucan endo-1,6-beta- | 3.2.1.75 | 32 | 81 |
| | glucosidase | | | |
| 33 | mannan endo-1,4-beta- | 3.2.1.78 | 33 | 82 |
| | mannosidase | | | |
| 34 | mannan endo-1,6-alpha- | 3.2.1.101 | 34 | 83 |
| | mannosidase | | | |
| 35 | endogalactosaminidase | 3.2.1.109 | 35 | 84 |
| 36 | endogalactosaminidase | 3.2.1.109 | 36 | 85 |
| 37 | endogalactosaminidase | 3.2.1.109 | 37 | 86 |
| 38 | endogalactosaminidase | 3.2.1.109 | 38 | 87 |
| 39 | endogalactosaminidase | 3.2.1.109 | 39 | 88 |
| 40 | endogalactosaminidase | 3.2.1.109 | 40 | 89 |
| 41 | glucan 1,4-alpha-maltohydrolase | 3.2.1.133 | 41 | 90 |
| 42 | serine endopeptidase | 3.4.21 | 42 | 91 |
| 43 | glutamyl endopeptidase | 3.4.21.19 | 43 | 92 |
| 44 | subtilisin | 3.4.21.62 | 44 | 93 |
| 45 | subtilisin | 3.4.21.62 | 45 | 94 |
| 46 | subtilisin | 3.4.21.62 | 46 | 95 |
| 47 | subtilisin | 3.4.21.62 | 47 | 96 |
| 48 | bacillolycin | 3.4.24.28 | 48 | 97 |
| 149 | pectate lyase | 4.2.2.2 | 149 | 202 |

[0159] In some embodiments, the protein is selected from the group consisting of:
[0160] a) a polypeptide having about/at least 60, 61, 62, 63, 64, 65, 66, 67, 68, 69, 70, 71, 72, 73, 74, 75, 76, 77, 78, 79, 80, 81, 82, 83, 84, 85, 86, 87, 88, 89, 90, 91, 92, 93, 94, 95, 96, 97, 98, 99 or 100% sequence identity to SEQ ID NO: 1;
[0161] b) a polypeptide having about/at least 60, 61, 62, 63, 64, 65, 66, 67, 68, 69, 70, 71, 72, 73, 74, 75, 76, 77, 78, 79, 80, 81, 82, 83, 84, 85, 86, 87, 88, 89, 90, 91, 92, 93, 94, 95, 96, 97, 98, 99 or 100% sequence identity to a mature polypeptide of SEQ ID NO: 1;
[0162] c) a polypeptide encoded by a polynucleotide having about/at least 60, 61, 62, 63, 64, 65, 66, 67, 68, 69, 70, 71, 72, 73, 74, 75, 76, 77, 78, 79, 80, 81, 82, 83, 84, 85, 86, 87, 88, 89, 90, 91, 92, 93, 94, 95, 96, 97, 98, 99 or 100% sequence identity to SEQ ID NO: 49 or the cDNA sequence thereof;
[0163] d) a polypeptide derived from SEQ ID NO: 1 by substitution, deletion or insertion of one or more amino acids;
[0164] e) a polypeptide derived from a mature polypeptide of SEQ ID NO: 1 by substitution, deletion or insertion of one or more amino acids;
[0165] f) a polypeptide derived from the polypeptide of any one of a) through e) wherein the N- and/or C-terminal end has been extended by the addition of one or more amino acids; and
[0166] g) a fragment of the polypeptide of any one of a) through f)
   wherein the polypeptide has glucose oxidase activity.

[0167] In some embodiments, the protein is selected from the group consisting of:
[0168] a) a polypeptide having about/at least 60, 61, 62, 63, 64, 65, 66, 67, 68, 69, 70, 71, 72, 73, 74, 75, 76, 77, 78, 79, 80, 81, 82, 83, 84, 85, 86, 87, 88, 89, 90, 91, 92, 93, 94, 95, 96, 97, 98, 99 or 100% sequence identity to SEQ ID NO: 2;
[0169] b) a polypeptide having about/at least 60, 61, 62, 63, 64, 65, 66, 67, 68, 69, 70, 71, 72, 73, 74, 75, 76, 77, 78, 79, 80, 81, 82, 83, 84, 85, 86, 87, 88, 89, 90, 91, 92, 93, 94, 95, 96, 97, 98, 99 or 100% sequence identity to a mature polypeptide of SEQ ID NO: 2;
[0170] c) a polypeptide encoded by a polynucleotide having about/at least 60, 61, 62, 63, 64, 65, 66, 67, 68, 69, 70, 71, 72, 73, 74, 75, 76, 77, 78, 79, 80, 81, 82, 83, 84, 85, 86, 87, 88, 89, 90, 91, 92, 93, 94, 95, 96, 97, 98, 99 or 100% sequence identity to SEQ ID NO: 50 or the cDNA sequence thereof;
[0171] d) a polypeptide derived from SEQ ID NO: 2 by substitution, deletion or insertion of one or more amino acids;
[0172] e) a polypeptide derived from a mature polypeptide of SEQ ID NO: 2 by substitution, deletion or insertion of one or more amino acids;
[0173] f) a polypeptide derived from the polypeptide of any one of a) through e) wherein the N- and/or C-terminal end has been extended by the addition of one or more amino acids; and
[0174] g) a fragment of the polypeptide of any one of a) through f)
   wherein the polypeptide has glucose oxidase activity.

[0175] In some embodiments, the protein is selected from the group consisting of:
[0176] a) a polypeptide having about/at least 60, 61, 62, 63, 64, 65, 66, 67, 68, 69, 70, 71, 72, 73, 74, 75, 76, 77, 78, 79, 80, 81, 82, 83, 84, 85, 86, 87, 88, 89, 90, 91, 92, 93, 94, 95, 96, 97, 98, 99 or 100% sequence identity to SEQ ID NO: 3;
[0177] b) a polypeptide having about/at least 60, 61, 62, 63, 64, 65, 66, 67, 68, 69, 70, 71, 72, 73, 74, 75, 76, 77, 78, 79, 80, 81, 82, 83, 84, 85, 86, 87, 88, 89, 90, 91, 92, 93, 94, 95, 96, 97, 98, 99 or 100% sequence identity to a mature polypeptide of SEQ ID NO: 3;
[0178] c) a polypeptide encoded by a polynucleotide having about/at least 60, 61, 62, 63, 64, 65, 66, 67, 68, 69, 70, 71, 72, 73, 74, 75, 76, 77, 78, 79, 80, 81, 82, 83, 84, 85, 86, 87, 88, 89, 90, 91, 92, 93, 94, 95, 96, 97, 98, 99 or 100% sequence identity to SEQ ID NO: 51 or the cDNA sequence thereof;
[0179] d) a polypeptide derived from SEQ ID NO: 3 by substitution, deletion or insertion of one or more amino acids;
[0180] e) a polypeptide derived from a mature polypeptide of SEQ ID NO: 3 by substitution, deletion or insertion of one or more amino acids;
[0181] f) a polypeptide derived from the polypeptide of any one of a) through e) wherein the N- and/or C-terminal end has been extended by the addition of one or more amino acids; and
[0182] g) a fragment of the polypeptide of any one of a) through f)
   wherein the polypeptide has glucose oxidase activity.

[0183] In some embodiments, the protein is selected from the group consisting of:
[0184] a) a polypeptide having about/at least 60, 61, 62, 63, 64, 65, 66, 67, 68, 69, 70, 71, 72, 73, 74, 75, 76, 77, 78, 79, 80, 81, 82, 83, 84, 85, 86, 87, 88, 89, 90, 91, 92, 93, 94, 95, 96, 97, 98, 99 or 100% sequence identity to SEQ ID NO: 4;
[0185] b) a polypeptide having about/at least 60, 61, 62, 63, 64, 65, 66, 67, 68, 69, 70, 71, 72, 73, 74, 75, 76, 77, 78, 79, 80, 81, 82, 83, 84, 85, 86, 87, 88, 89, 90, 91, 92, 93, 94, 95, 96, 97, 98, 99 or 100% sequence identity to a mature polypeptide of SEQ ID NO: 4;
[0186] c) a polypeptide encoded by a polynucleotide having about/at least 60, 61, 62, 63, 64, 65, 66, 67, 68, 69, 70, 71, 72, 73, 74, 75, 76, 77, 78, 79, 80, 81, 82, 83, 84, 85, 86, 87, 88, 89, 90, 91, 92, 93, 94, 95, 96, 97, 98, 99 or 100% sequence identity to SEQ ID NO: 52 or the cDNA sequence thereof;
[0187] d) a polypeptide derived from SEQ ID NO: 4 by substitution, deletion or insertion of one or more amino acids;
[0188] e) a polypeptide derived from a mature polypeptide of SEQ ID NO: 4 by substitution, deletion or insertion of one or more amino acids;
[0189] f) a polypeptide derived from the polypeptide of any one of a) through e) wherein the N- and/or C-terminal end has been extended by the addition of one or more amino acids; and
[0190] g) a fragment of the polypeptide of any one of a) through f)
   wherein the polypeptide has glucose oxidase activity.

[0191] In some embodiments, the protein is selected from the group consisting of:
[0192] a) a polypeptide having about/at least 60, 61, 62, 63, 64, 65, 66, 67, 68, 69, 70, 71, 72, 73, 74, 75, 76, 77, 78, 79, 80, 81, 82, 83, 84, 85, 86, 87, 88, 89, 90, 91, 92, 93, 94, 95, 96, 97, 98, 99 or 100% sequence identity to SEQ ID NO: 5;
[0193] b) a polypeptide having about/at least 60, 61, 62, 63, 64, 65, 66, 67, 68, 69, 70, 71, 72, 73, 74, 75, 76, 77, 78, 79, 80, 81, 82, 83, 84, 85, 86, 87, 88, 89, 90, 91, 92, 93, 94, 95, 96, 97, 98, 99 or 100% sequence identity to a mature polypeptide of SEQ ID NO: 5;
[0194] c) a polypeptide encoded by a polynucleotide having about/at least 60, 61, 62, 63, 64, 65, 66, 67, 68, 69, 70, 71, 72, 73, 74, 75, 76, 77, 78, 79, 80, 81, 82, 83, 84, 85, 86, 87, 88, 89, 90, 91, 92, 93, 94, 95, 96, 97, 98, 99 or 100% sequence identity to SEQ ID NO: 53 or the cDNA sequence thereof;
[0195] d) a polypeptide derived from SEQ ID NO: 5 by substitution, deletion or insertion of one or more amino acids;
[0196] e) a polypeptide derived from a mature polypeptide of SEQ ID NO: 5 by substitution, deletion or insertion of one or more amino acids;
[0197] f) a polypeptide derived from the polypeptide of any one of a) through e) wherein the N- and/or C-terminal end has been extended by the addition of one or more amino acids; and
[0198] g) a fragment of the polypeptide of any one of a) through f)
   wherein the polypeptide has glucose oxidase activity.

[0199] In some embodiments, the protein is selected from the group consisting of:
[0200] a) a polypeptide having about/at least 60, 61, 62, 63, 64, 65, 66, 67, 68, 69, 70, 71, 72, 73, 74, 75, 76, 77, 78, 79, 80, 81, 82, 83, 84, 85, 86, 87, 88, 89, 90, 91, 92, 93, 94, 95, 96, 97, 98, 99 or 100% sequence identity to SEQ ID NO: 6;
[0201] b) a polypeptide having about/at least 60, 61, 62, 63, 64, 65, 66, 67, 68, 69, 70, 71, 72, 73, 74, 75, 76, 77, 78, 79, 80, 81, 82, 83, 84, 85, 86, 87, 88, 89, 90, 91, 92, 93, 94, 95, 96, 97, 98, 99 or 100% sequence identity to a mature polypeptide of SEQ ID NO: 6;
[0202] c) a polypeptide encoded by a polynucleotide having about/at least 60, 61, 62, 63, 64, 65, 66, 67, 68, 69, 70, 71, 72, 73, 74, 75, 76, 77, 78, 79, 80, 81, 82, 83, 84, 85, 86, 87, 88, 89, 90, 91, 92, 93, 94, 95, 96, 97, 98, 99 or 100% sequence identity to SEQ ID NO: 54 or the cDNA sequence thereof;
[0203] d) a polypeptide derived from SEQ ID NO: 6 by substitution, deletion or insertion of one or more amino acids;
[0204] e) a polypeptide derived from a mature polypeptide of SEQ ID NO: 6 by substitution, deletion or insertion of one or more amino acids;
[0205] f) a polypeptide derived from the polypeptide of any one of a) through e) wherein the N- and/or C-terminal end has been extended by the addition of one or more amino acids; and
[0206] g) a fragment of the polypeptide of any one of a) through f) wherein the polypeptide has cellobiose oxidase activity.

[0207] In some embodiments, the protein is selected from the group consisting of:
[0208] a) a polypeptide having about/at least 60, 61, 62, 63, 64, 65, 66, 67, 68, 69, 70, 71, 72, 73, 74, 75, 76, 77, 78, 79, 80, 81, 82, 83, 84, 85, 86, 87, 88, 89, 90, 91, 92, 93, 94, 95, 96, 97, 98, 99 or 100% sequence identity to SEQ ID NO: 7;
[0209] b) a polypeptide having about/at least 60, 61, 62, 63, 64, 65, 66, 67, 68, 69, 70, 71, 72, 73, 74, 75, 76, 77, 78, 79, 80, 81, 82, 83, 84, 85, 86, 87, 88, 89, 90, 91, 92, 93, 94, 95, 96, 97, 98, 99 or 100% sequence identity to a mature polypeptide of SEQ ID NO: 7;
[0210] c) a polypeptide encoded by a polynucleotide having about/at least 60, 61, 62, 63, 64, 65, 66, 67, 68, 69, 70, 71, 72, 73, 74, 75, 76, 77, 78, 79, 80, 81, 82, 83, 84, 85, 86, 87, 88, 89, 90, 91, 92, 93, 94, 95, 96, 97, 98, 99 or 100% sequence identity to SEQ ID NO: 55 or the cDNA sequence thereof;
[0211] d) a polypeptide derived from SEQ ID NO: 7 by substitution, deletion or insertion of one or more amino acids;
[0212] e) a polypeptide derived from a mature polypeptide of SEQ ID NO: 7 by substitution, deletion or insertion of one or more amino acids;
[0213] f) a polypeptide derived from the polypeptide of any one of a) through e) wherein the N- and/or C-terminal end has been extended by the addition of one or more amino acids; and
[0214] g) a fragment of the polypeptide of any one of a) through f)
   wherein the polypeptide has cellobiose oxidase activity.

[0215] In some embodiments, the protein is selected from the group consisting of:
[0216] a) a polypeptide having about/at least 60, 61, 62, 63, 64, 65, 66, 67, 68, 69, 70, 71, 72, 73, 74, 75, 76, 77, 78, 79, 80, 81, 82, 83, 84, 85, 86, 87, 88, 89, 90, 91, 92, 93, 94, 95, 96, 97, 98, 99 or 100% sequence identity to SEQ ID NO: 8;
[0217] b) a polypeptide having about/at least 60, 61, 62, 63, 64, 65, 66, 67, 68, 69, 70, 71, 72, 73, 74, 75, 76, 77, 78, 79, 80, 81, 82, 83, 84, 85, 86, 87, 88, 89, 90, 91, 92, 93, 94, 95, 96, 97, 98, 99 or 100% sequence identity to a mature polypeptide of SEQ ID NO: 8;
[0218] c) a polypeptide encoded by a polynucleotide having about/at least 60, 61, 62, 63, 64, 65, 66, 67, 68, 69, 70, 71, 72, 73, 74, 75, 76, 77, 78, 79, 80, 81, 82, 83, 84, 85, 86, 87, 88, 89, 90, 91, 92, 93, 94, 95, 96, 97, 98, 99 or 100% sequence identity to SEQ ID NO: 56 or the cDNA sequence thereof;
[0219] d) a polypeptide derived from SEQ ID NO: 8 by substitution, deletion or insertion of one or more amino acids;
[0220] e) a polypeptide derived from a mature polypeptide of SEQ ID NO: 8 by substitution, deletion or insertion of one or more amino acids;
[0221] f) a polypeptide derived from the polypeptide of any one of a) through e) wherein the N- and/or C-terminal end has been extended by the addition of one or more amino acids; and
[0222] g) a fragment of the polypeptide of any one of a) through f) wherein the polypeptide has cellobiose oxidase activity.

[0223] In some embodiments, the protein is selected from the group consisting of:
[0224] a) a polypeptide having about/at least 60, 61, 62, 63, 64, 65, 66, 67, 68, 69, 70, 71, 72, 73, 74, 75, 76, 77, 78, 79, 80, 81, 82, 83, 84, 85, 86, 87, 88, 89, 90, 91, 92, 93, 94, 95, 96, 97, 98, 99 or 100% sequence identity to SEQ ID NO: 9;
[0225] b) a polypeptide having about/at least 60, 61, 62, 63, 64, 65, 66, 67, 68, 69, 70, 71, 72, 73, 74, 75, 76, 77, 78, 79, 80, 81, 82, 83, 84, 85, 86, 87, 88, 89, 90, 91, 92, 93, 94, 95, 96, 97, 98, 99 or 100% sequence identity to a mature polypeptide of SEQ ID NO: 9;
[0226] c) a polypeptide encoded by a polynucleotide having about/at least 60, 61, 62, 63, 64, 65, 66, 67, 68, 69, 70, 71, 72, 73, 74, 75, 76, 77, 78, 79, 80, 81, 82, 83, 84, 85, 86, 87, 88, 89, 90, 91, 92, 93, 94, 95, 96, 97, 98, 99 or 100% sequence identity to SEQ ID NO: 57 or the cDNA sequence thereof;
[0227] d) a polypeptide derived from SEQ ID NO: 9 by substitution, deletion or insertion of one or more amino acids;
[0228] e) a polypeptide derived from a mature polypeptide of SEQ ID NO: 9 by substitution, deletion or insertion of one or more amino acids;
[0229] f) a polypeptide derived from the polypeptide of any one of a) through e) wherein the N- and/or C-terminal end has been extended by the addition of one or more amino acids; and
[0230] g) a fragment of the polypeptide of any one of a) through f)
   wherein the polypeptide has laccase activity.

[0231] In some embodiments, the protein is selected from the group consisting of:
[0232] a) a polypeptide having about/at least 60, 61, 62, 63, 64, 65, 66, 67, 68, 69, 70, 71, 72, 73, 74, 75, 76, 77, 78, 79, 80, 81, 82, 83, 84, 85, 86, 87, 88, 89, 90, 91, 92, 93, 94, 95, 96, 97, 98, 99 or 100% sequence identity to SEQ ID NO: 10;
[0233] b) a polypeptide having about/at least 60, 61, 62, 63, 64, 65, 66, 67, 68, 69, 70, 71, 72, 73, 74, 75, 76, 77, 78, 79, 80, 81, 82, 83, 84, 85, 86, 87, 88, 89, 90, 91, 92, 93, 94, 95, 96, 97, 98, 99 or 100% sequence identity to a mature polypeptide of SEQ ID NO: 10;
[0234] c) a polypeptide encoded by a polynucleotide having about/at least 60, 61, 62, 63, 64, 65, 66, 67, 68, 69, 70, 71, 72, 73, 74, 75, 76, 77, 78, 79, 80, 81, 82, 83, 84, 85, 86, 87, 88, 89, 90, 91, 92, 93, 94, 95, 96, 97, 98, 99 or 100% sequence identity to SEQ ID NO: 58 or the cDNA sequence thereof;
[0235] d) a polypeptide derived from SEQ ID NO: 10 by substitution, deletion or insertion of one or more amino acids;
[0236] e) a polypeptide derived from a mature polypeptide of SEQ ID NO: 10 by substitution, deletion or insertion of one or more amino acids;
[0237] f) a polypeptide derived from the polypeptide of any one of a) through e) wherein the N- and/or C-terminal end has been extended by the addition of one or more amino acids; and
[0238] g) a fragment of the polypeptide of any one of a) through f)
   wherein the polypeptide has catalase activity.

[0239] In some embodiments, the protein is selected from the group consisting of:
[0240] a) a polypeptide having about/at least 60, 61, 62, 63, 64, 65, 66, 67, 68, 69, 70, 71, 72, 73, 74, 75, 76, 77, 78, 79, 80, 81, 82, 83, 84, 85, 86, 87, 88, 89, 90, 91, 92, 93, 94, 95, 96, 97, 98, 99 or 100% sequence identity to SEQ ID NO: 11;
[0241] b) a polypeptide having about/at least 60, 61, 62, 63, 64, 65, 66, 67, 68, 69, 70, 71, 72, 73, 74, 75, 76, 77, 78, 79, 80, 81, 82, 83, 84, 85, 86, 87, 88, 89, 90, 91, 92, 93, 94, 95, 96, 97, 98, 99 or 100% sequence identity to a mature polypeptide of SEQ ID NO: 11;
[0242] c) a polypeptide encoded by a polynucleotide having about/at least 60, 61, 62, 63, 64, 65, 66, 67, 68, 69, 70, 71, 72, 73, 74, 75, 76, 77, 78, 79, 80, 81, 82, 83, 84, 85, 86, 87, 88, 89, 90, 91, 92, 93, 94, 95, 96, 97, 98, 99 or 100% sequence identity to SEQ ID NO: 59 or the cDNA sequence thereof;
[0243] d) a polypeptide encoded by a polynucleotide having about/at least 60, 61, 62, 63, 64, 65, 66, 67, 68, 69, 70, 71, 72, 73, 74, 75, 76, 77, 78, 79, 80, 81, 82, 83, 84, 85, 86, 87, 88, 89, 90, 91, 92, 93, 94, 95, 96, 97, 98, 99 or 100% sequence identity to SEQ ID NO: 60 or the cDNA sequence thereof;
[0244] e) a polypeptide derived from SEQ ID NO: 11 by substitution, deletion or insertion of one or more amino acids;
[0245] f) a polypeptide derived from a mature polypeptide of SEQ ID NO: 11 by substitution, deletion or insertion of one or more amino acids;
[0246] g) a polypeptide derived from the polypeptide of any one of a) through f) wherein the N- and/or C-terminal end has been extended by the addition of one or more amino acids; and
[0247] h) a fragment of the polypeptide of any one of a) through g)
   wherein the polypeptide has catalase activity.

[0248] In some embodiments, the protein is selected from the group consisting of:
[0249] a) a polypeptide having about/at least 60, 61, 62, 63, 64, 65, 66, 67, 68, 69, 70, 71, 72, 73, 74, 75, 76, 77, 78, 79, 80, 81, 82, 83, 84, 85, 86, 87, 88, 89, 90, 91, 92, 93, 94, 95, 96, 97, 98, 99 or 100% sequence identity to SEQ ID NO: 12;
[0250] b) a polypeptide having about/at least 60, 61, 62, 63, 64, 65, 66, 67, 68, 69, 70, 71, 72, 73, 74, 75, 76, 77, 78, 79, 80, 81, 82, 83, 84, 85, 86, 87, 88, 89, 90, 91, 92, 93, 94, 95, 96, 97, 98, 99 or 100% sequence identity to a mature polypeptide of SEQ ID NO: 12;
[0251] c) a polypeptide encoded by a polynucleotide having about/at least 60, 61, 62, 63, 64, 65, 66, 67, 68, 69, 70, 71, 72, 73, 74, 75, 76, 77, 78, 79, 80, 81, 82, 83, 84, 85, 86, 87, 88, 89, 90, 91, 92, 93, 94, 95, 96, 97, 98, 99 or 100% sequence identity to SEQ ID NO: 61 or the cDNA sequence thereof;
[0252] d) a polypeptide derived from SEQ ID NO: 12 by substitution, deletion or insertion of one or more amino acids;
[0253] e) a polypeptide derived from a mature polypeptide of SEQ ID NO: 12 by substitution, deletion or insertion of one or more amino acids;
[0254] f) a polypeptide derived from the polypeptide of any one of a) through e) wherein the N- and/or C-terminal end has been extended by the addition of one or more amino acids; and
[0255] g) a fragment of the polypeptide of any one of a) through f)
   wherein the polypeptide has peroxidase activity.

[0256] In some embodiments, the protein is selected from the group consisting of:
[0257] a) a polypeptide having about/at least 60, 61, 62, 63, 64, 65, 66, 67, 68, 69, 70, 71, 72, 73, 74, 75, 76, 77, 78, 79, 80, 81, 82, 83, 84, 85, 86, 87, 88, 89, 90, 91, 92, 93, 94, 95, 96, 97, 98, 99 or 100% sequence identity to SEQ ID NO: 13;
[0258] b) a polypeptide having about/at least 60, 61, 62, 63, 64, 65, 66, 67, 68, 69, 70, 71, 72, 73, 74, 75, 76, 77, 78, 79, 80, 81, 82, 83, 84, 85, 86, 87, 88, 89, 90, 91, 92, 93, 94, 95, 96, 97, 98, 99 or 100% sequence identity to a mature polypeptide of SEQ ID NO: 13;
[0259] c) a polypeptide encoded by a polynucleotide having about/at least 60, 61, 62, 63, 64, 65, 66, 67, 68, 69, 70, 71, 72, 73, 74, 75, 76, 77, 78, 79, 80, 81, 82, 83, 84, 85, 86, 87, 88, 89, 90, 91, 92, 93, 94, 95, 96, 97, 98, 99 or 100% sequence identity to SEQ ID NO: 62 or the cDNA sequence thereof;
[0260] d) a polypeptide derived from SEQ ID NO: 13 by substitution, deletion or insertion of one or more amino acids;
[0261] e) a polypeptide derived from a mature polypeptide of SEQ ID NO: 13 by substitution, deletion or insertion of one or more amino acids;
[0262] f) a polypeptide derived from the polypeptide of any one of a) through e) wherein the N- and/or C-terminal end has been extended by the addition of one or more amino acids; and
[0263] g) a fragment of the polypeptide of any one of a) through f)
   wherein the polypeptide has lysophospholipase activity.

[0264] In some embodiments, the protein is selected from the group consisting of:
[0265] a) a polypeptide having about/at least 60, 61, 62, 63, 64, 65, 66, 67, 68, 69, 70, 71, 72, 73, 74, 75, 76, 77, 78, 79, 80, 81, 82, 83, 84, 85, 86, 87, 88, 89, 90, 91, 92, 93, 94, 95, 96, 97, 98, 99 or 100% sequence identity to SEQ ID NO: 14;
[0266] b) a polypeptide having about/at least 60, 61, 62, 63, 64, 65, 66, 67, 68, 69, 70, 71, 72, 73, 74, 75, 76, 77, 78, 79, 80, 81, 82, 83, 84, 85, 86, 87, 88, 89, 90, 91, 92, 93, 94, 95, 96, 97, 98, 99 or 100% sequence identity to a mature polypeptide of SEQ ID NO: 14;
[0267] c) a polypeptide encoded by a polynucleotide having about/at least 60, 61, 62, 63, 64, 65, 66, 67, 68, 69, 70, 71, 72, 73, 74, 75, 76, 77, 78, 79, 80, 81, 82, 83, 84, 85, 86, 87, 88, 89, 90, 91, 92, 93, 94, 95, 96, 97, 98, 99 or 100% sequence identity to SEQ ID NO: 63 or the cDNA sequence thereof;
[0268] d) a polypeptide derived from SEQ ID NO: 14 by substitution, deletion or insertion of one or more amino acids;
[0269] e) a polypeptide derived from a mature polypeptide of SEQ ID NO: 14 by substitution, deletion or insertion of one or more amino acids;
[0270] f) a polypeptide derived from the polypeptide of any one of a) through e) wherein the N- and/or C-terminal end has been extended by the addition of one or more amino acids; and
[0271] g) a fragment of the polypeptide of any one of a) through f)
   wherein the polypeptide has alpha-amylase activity.

[0272] In some embodiments, the protein is selected from the group consisting of:
[0273] a) a polypeptide having about/at least 60, 61, 62, 63, 64, 65, 66, 67, 68, 69, 70, 71, 72, 73, 74, 75, 76, 77, 78, 79, 80, 81, 82, 83, 84, 85, 86, 87, 88, 89, 90, 91, 92, 93, 94, 95, 96, 97, 98, 99 or 100% sequence identity to SEQ ID NO: 15;
[0274] b) a polypeptide having about/at least 60, 61, 62, 63, 64, 65, 66, 67, 68, 69, 70, 71, 72, 73, 74, 75, 76, 77, 78, 79, 80, 81, 82, 83, 84, 85, 86, 87, 88, 89, 90, 91, 92, 93, 94, 95, 96, 97, 98, 99 or 100% sequence identity to a mature polypeptide of SEQ ID NO: 15;
[0275] c) a polypeptide encoded by a polynucleotide having about/at least 60, 61, 62, 63, 64, 65, 66, 67, 68, 69, 70, 71, 72, 73, 74, 75, 76, 77, 78, 79, 80, 81, 82, 83, 84, 85, 86, 87, 88, 89, 90, 91, 92, 93, 94, 95, 96, 97, 98, 99 or 100% sequence identity to SEQ ID NO: 64 or the cDNA sequence thereof;
[0276] d) a polypeptide derived from SEQ ID NO: 15 by substitution, deletion or insertion of one or more amino acids;
[0277] e) a polypeptide derived from a mature polypeptide of SEQ ID NO: 15 by substitution, deletion or insertion of one or more amino acids;
[0278] f) a polypeptide derived from the polypeptide of any one of a) through e) wherein the N- and/or C-terminal end has been extended by the addition of one or more amino acids; and
[0279] g) a fragment of the polypeptide of any one of a) through f)
   wherein the polypeptide has alpha-amylase activity.

[0280] In some embodiments, the protein is selected from the group consisting of:
[0281] a) a polypeptide having about/at least 60, 61, 62, 63, 64, 65, 66, 67, 68, 69, 70, 71, 72, 73, 74, 75, 76, 77, 78, 79, 80, 81, 82, 83, 84, 85, 86, 87, 88, 89, 90, 91, 92, 93, 94, 95, 96, 97, 98, 99 or 100% sequence identity to SEQ ID NO: 16;
[0282] b) a polypeptide having about/at least 60, 61, 62, 63, 64, 65, 66, 67, 68, 69, 70, 71, 72, 73, 74, 75, 76, 77, 78, 79, 80, 81, 82, 83, 84, 85, 86, 87, 88, 89, 90, 91, 92, 93, 94, 95, 96, 97, 98, 99 or 100% sequence identity to a mature polypeptide of SEQ ID NO: 16;
[0283] c) a polypeptide encoded by a polynucleotide having about/at least 60, 61, 62, 63, 64, 65, 66, 67, 68, 69, 70, 71, 72, 73, 74, 75, 76, 77, 78, 79, 80, 81, 82, 83, 84, 85, 86, 87, 88, 89, 90, 91, 92, 93, 94, 95, 96, 97, 98, 99 or 100% sequence identity to SEQ ID NO: 65 or the cDNA sequence thereof;
[0284] d) a polypeptide derived from SEQ ID NO: 16 by substitution, deletion or insertion of one or more amino acids;
[0285] e) a polypeptide derived from a mature polypeptide of SEQ ID NO: 16 by substitution, deletion or insertion of one or more amino acids;
[0286] f) a polypeptide derived from the polypeptide of any one of a) through e) wherein the N- and/or C-terminal end has been extended by the addition of one or more amino acids; and
[0287] g) a fragment of the polypeptide of any one of a) through f)
   wherein the polypeptide has alpha-amylase activity.

[0288] In some embodiments, the protein is selected from the group consisting of:
[0289] a) a polypeptide having about/at least 60, 61, 62, 63, 64, 65, 66, 67, 68, 69, 70, 71, 72, 73, 74, 75, 76, 77, 78, 79, 80, 81, 82, 83, 84, 85, 86, 87, 88, 89, 90, 91, 92, 93, 94, 95, 96, 97, 98, 99 or 100% sequence identity to SEQ ID NO: 17;
[0290] b) a polypeptide having about/at least 60, 61, 62, 63, 64, 65, 66, 67, 68, 69, 70, 71, 72, 73, 74, 75, 76, 77, 78, 79, 80, 81, 82, 83, 84, 85, 86, 87, 88, 89, 90, 91, 92, 93, 94, 95, 96, 97, 98, 99 or 100% sequence identity to a mature polypeptide of SEQ ID NO: 17;
[0291] c) a polypeptide encoded by a polynucleotide having about/at least 60, 61, 62, 63, 64, 65, 66, 67, 68, 69, 70, 71, 72, 73, 74, 75, 76, 77, 78, 79, 80, 81, 82, 83, 84, 85, 86, 87, 88, 89, 90, 91, 92, 93, 94, 95, 96, 97, 98, 99 or 100% sequence identity to SEQ ID NO: 66 or the cDNA sequence thereof;
[0292] d) a polypeptide derived from SEQ ID NO: 17 by substitution, deletion or insertion of one or more amino acids;
[0293] e) a polypeptide derived from a mature polypeptide of SEQ ID NO: 17 by substitution, deletion or insertion of one or more amino acids;
[0294] f) a polypeptide derived from the polypeptide of any one of a) through e) wherein the N- and/or C-terminal end has been extended by the addition of one or more amino acids; and
[0295] g) a fragment of the polypeptide of any one of a) through f)
   wherein the polypeptide has triacylglycerol lipase activity.

[0296] In some embodiments, the protein is selected from the group consisting of:
[0297] a) a polypeptide having about/at least 60, 61, 62, 63, 64, 65, 66, 67, 68, 69, 70, 71, 72, 73, 74, 75, 76, 77, 78, 79, 80, 81, 82, 83, 84, 85, 86, 87, 88, 89, 90, 91, 92, 93, 94, 95, 96, 97, 98, 99 or 100% sequence identity to SEQ ID NO: 18;
[0298] b) a polypeptide having about/at least 60, 61, 62, 63, 64, 65, 66, 67, 68, 69, 70, 71, 72, 73, 74, 75, 76, 77, 78, 79, 80, 81, 82, 83, 84, 85, 86, 87, 88, 89, 90, 91, 92, 93, 94, 95, 96, 97, 98, 99 or 100% sequence identity to a mature polypeptide of SEQ ID NO: 18;
[0299] c) a polypeptide encoded by a polynucleotide having about/at least 60, 61, 62, 63, 64, 65, 66, 67, 68, 69, 70, 71, 72, 73, 74, 75, 76, 77, 78, 79, 80, 81, 82, 83, 84, 85, 86, 87, 88, 89, 90, 91, 92, 93, 94, 95, 96, 97, 98, 99 or 100% sequence identity to SEQ ID NO: 67 or the cDNA sequence thereof;
[0300] d) a polypeptide derived from SEQ ID NO: 18 by substitution, deletion or insertion of one or more amino acids;
[0301] e) a polypeptide derived from a mature polypeptide of SEQ ID NO: 18 by substitution, deletion or insertion of one or more amino acids;
[0302] f) a polypeptide derived from the polypeptide of any one of a) through e) wherein the N- and/or C-terminal end has been extended by the addition of one or more amino acids; and
[0303] g) a fragment of the polypeptide of any one of a) through f) wherein the polypeptide has triacylglycerol lipase activity.

[0304] In some embodiments, the protein is selected from the group consisting of:
[0305] a) a polypeptide having about/at least 60, 61, 62, 63, 64, 65, 66, 67, 68, 69, 70, 71, 72, 73, 74, 75, 76, 77, 78, 79, 80, 81, 82, 83, 84, 85, 86, 87, 88, 89, 90, 91, 92, 93, 94, 95, 96, 97, 98, 99 or 100% sequence identity to SEQ ID NO: 19;
[0306] b) a polypeptide having about/at least 60, 61, 62, 63, 64, 65, 66, 67, 68, 69, 70, 71, 72, 73, 74, 75, 76, 77, 78, 79, 80, 81, 82, 83, 84, 85, 86, 87, 88, 89, 90, 91, 92, 93, 94, 95, 96, 97, 98, 99 or 100% sequence identity to a mature polypeptide of SEQ ID NO: 19;
[0307] c) a polypeptide encoded by a polynucleotide having about/at least 60, 61, 62, 63, 64, 65, 66, 67, 68, 69, 70, 71, 72, 73, 74, 75, 76, 77, 78, 79, 80, 81, 82, 83, 84, 85, 86, 87, 88, 89, 90, 91, 92, 93, 94, 95, 96, 97, 98, 99 or 100% sequence identity to SEQ ID NO: 68 or the cDNA sequence thereof;
[0308] d) a polypeptide derived from SEQ ID NO: 19 by substitution, deletion or insertion of one or more amino acids;
[0309] e) a polypeptide derived from a mature polypeptide of SEQ ID NO: 19 by substitution, deletion or insertion of one or more amino acids;
[0310] f) a polypeptide derived from the polypeptide of any one of a) through e) wherein the N- and/or C-terminal end has been extended by the addition of one or more amino acids; and
[0311] g) a fragment of the polypeptide of any one of a) through f)
   wherein the polypeptide has cellulase activity.

[0312] In some embodiments, the protein is selected from the group consisting of:
[0313] a) a polypeptide having about/at least 60, 61, 62, 63, 64, 65, 66, 67, 68, 69, 70, 71, 72, 73, 74, 75, 76, 77, 78, 79, 80, 81, 82, 83, 84, 85, 86, 87, 88, 89, 90, 91, 92, 93, 94, 95, 96, 97, 98, 99 or 100% sequence identity to SEQ ID NO: 20;
[0314] b) a polypeptide having about/at least 60, 61, 62, 63, 64, 65, 66, 67, 68, 69, 70, 71, 72, 73, 74, 75, 76, 77, 78, 79, 80, 81, 82, 83, 84, 85, 86, 87, 88, 89, 90, 91, 92, 93, 94, 95, 96, 97, 98, 99 or 100% sequence identity to a mature polypeptide of SEQ ID NO: 20;
[0315] c) a polypeptide encoded by a polynucleotide having about/at least 60, 61, 62, 63, 64, 65, 66, 67, 68, 69, 70, 71, 72, 73, 74, 75, 76, 77, 78, 79, 80, 81, 82, 83, 84, 85, 86, 87, 88, 89, 90, 91, 92, 93, 94, 95, 96, 97, 98, 99 or 100% sequence identity to SEQ ID NO: 69 or the cDNA sequence thereof;
[0316] d) a polypeptide derived from SEQ ID NO: 20 by substitution, deletion or insertion of one or more amino acids;
[0317] e) a polypeptide derived from a mature polypeptide of SEQ ID NO: 20 by substitution, deletion or insertion of one or more amino acids;
[0318] f) a polypeptide derived from the polypeptide of any one of a) through e) wherein the N- and/or C-terminal end has been extended by the addition of one or more amino acids; and
[0319] g) a fragment of the polypeptide of any one of a) through f)
   wherein the polypeptide has endo-1,3(4)-beta-glucanse activity.

[0320] In some embodiments, the protein is selected from the group consisting of:
[0321] a) a polypeptide having about/at least 60, 61, 62, 63, 64, 65, 66, 67, 68, 69, 70, 71, 72, 73, 74, 75, 76, 77, 78, 79, 80, 81, 82, 83, 84, 85, 86, 87, 88, 89, 90, 91, 92, 93, 94, 95, 96, 97, 98, 99 or 100% sequence identity to SEQ ID NO: 21;
[0322] b) a polypeptide having about/at least 60, 61, 62, 63, 64, 65, 66, 67, 68, 69, 70, 71, 72, 73, 74, 75, 76, 77, 78, 79, 80, 81, 82, 83, 84, 85, 86, 87, 88, 89, 90, 91, 92, 93, 94, 95, 96, 97, 98, 99 or 100% sequence identity to a mature polypeptide of SEQ ID NO: 21;
[0323] c) a polypeptide encoded by a polynucleotide having about/at least 60, 61, 62, 63, 64, 65, 66, 67, 68, 69, 70, 71, 72, 73, 74, 75, 76, 77, 78, 79, 80, 81, 82, 83, 84, 85, 86, 87, 88, 89, 90, 91, 92, 93, 94, 95, 96, 97, 98, 99 or 100% sequence identity to SEQ ID NO: 70 or the cDNA sequence thereof;
[0324] d) a polypeptide derived from SEQ ID NO: 21 by substitution, deletion or insertion of one or more amino acids;
[0325] e) a polypeptide derived from a mature polypeptide of SEQ ID NO: 21 by substitution, deletion or insertion of one or more amino acids;
[0326] f) a polypeptide derived from the polypeptide of any one of a) through e) wherein the N- and/or C-terminal end has been extended by the addition of one or more amino acids; and
[0327] g) a fragment of the polypeptide of any one of a) through f)
   wherein the polypeptide has endo-1,4-beta-xylanase activity.

[0328] In some embodiments, the protein is selected from the group consisting of:
[0329] a) a polypeptide having about/at least 60, 61, 62, 63, 64, 65, 66, 67, 68, 69, 70, 71, 72, 73, 74, 75, 76, 77, 78, 79, 80, 81, 82, 83, 84, 85, 86, 87, 88, 89, 90, 91, 92, 93, 94, 95, 96, 97, 98, 99 or 100% sequence identity to SEQ ID NO: 22;
[0330] b) a polypeptide having about/at least 60, 61, 62, 63, 64, 65, 66, 67, 68, 69, 70, 71, 72, 73, 74, 75, 76, 77, 78, 79, 80, 81, 82, 83, 84, 85, 86, 87, 88, 89, 90, 91, 92, 93, 94, 95, 96, 97, 98, 99 or 100% sequence identity to a mature polypeptide of SEQ ID NO: 22;
[0331] c) a polypeptide encoded by a polynucleotide having about/at least 60, 61, 62, 63, 64, 65, 66, 67, 68, 69, 70, 71, 72, 73, 74, 75, 76, 77, 78, 79, 80, 81, 82, 83, 84, 85, 86, 87, 88, 89, 90, 91, 92, 93, 94, 95, 96, 97, 98, 99 or 100% sequence identity to SEQ ID NO: 71 or the cDNA sequence thereof;
[0332] d) a polypeptide derived from SEQ ID NO: 22 by substitution, deletion or insertion of one or more amino acids;
[0333] e) a polypeptide derived from a mature polypeptide of SEQ ID NO: 22 by substitution, deletion or insertion of one or more amino acids;
[0334] f) a polypeptide derived from the polypeptide of any one of a) through e) wherein the N- and/or C-terminal end has been extended by the addition of one or more amino acids; and
[0335] g) a fragment of the polypeptide of any one of a) through f)
   wherein the polypeptide has endo-1,4-beta-xylanase activity.

[0336] In some embodiments, the protein is selected from the group consisting of:
[0337] a) a polypeptide having about/at least 60, 61, 62, 63, 64, 65, 66, 67, 68, 69, 70, 71, 72, 73, 74, 75, 76, 77, 78, 79, 80, 81, 82, 83, 84, 85, 86, 87, 88, 89, 90, 91, 92, 93, 94, 95, 96, 97, 98, 99 or 100% sequence identity to SEQ ID NO: 23;
[0338] b) a polypeptide having about/at least 60, 61, 62, 63, 64, 65, 66, 67, 68, 69, 70, 71, 72, 73, 74, 75, 76, 77, 78, 79, 80, 81, 82, 83, 84, 85, 86, 87, 88, 89, 90, 91, 92, 93, 94, 95, 96, 97, 98, 99 or 100% sequence identity to a mature polypeptide of SEQ ID NO: 23;
[0339] c) a polypeptide encoded by a polynucleotide having about/at least 60, 61, 62, 63, 64, 65, 66, 67, 68, 69, 70, 71, 72, 73, 74, 75, 76, 77, 78, 79, 80, 81, 82, 83, 84, 85, 86, 87, 88, 89, 90, 91, 92, 93, 94, 95, 96, 97, 98, 99 or 100% sequence identity to SEQ ID NO: 72 or the cDNA sequence thereof;
[0340] d) a polypeptide derived from SEQ ID NO: 23 by substitution, deletion or insertion of one or more amino acids;
[0341] e) a polypeptide derived from a mature polypeptide of SEQ ID NO: 23 by substitution, deletion or insertion of one or more amino acids;
[0342] f) a polypeptide derived from the polypeptide of any one of a) through e) wherein the N- and/or C-terminal end has been extended by the addition of one or more amino acids; and
[0343] g) a fragment of the polypeptide of any one of a) through f)
   wherein the polypeptide has endo-1,4-beta-xylanase activity.

[0344] In some embodiments, the protein is selected from the group consisting of:
[0345] a) a polypeptide having about/at least 60, 61, 62, 63, 64, 65, 66, 67, 68, 69, 70, 71, 72, 73, 74, 75, 76, 77, 78, 79, 80, 81, 82, 83, 84, 85, 86, 87, 88, 89, 90, 91, 92, 93, 94, 95, 96, 97, 98, 99 or 100% sequence identity to SEQ ID NO: 24;
[0346] b) a polypeptide having about/at least 60, 61, 62, 63, 64, 65, 66, 67, 68, 69, 70, 71, 72, 73, 74, 75, 76, 77, 78, 79, 80, 81, 82, 83, 84, 85, 86, 87, 88, 89, 90, 91, 92, 93, 94, 95, 96, 97, 98, 99 or 100% sequence identity to a mature polypeptide of SEQ ID NO: 24;
[0347] c) a polypeptide encoded by a polynucleotide having about/at least 60, 61, 62, 63, 64, 65, 66, 67, 68, 69, 70, 71, 72, 73, 74, 75, 76, 77, 78, 79, 80, 81, 82, 83, 84, 85, 86, 87, 88, 89, 90, 91, 92, 93, 94, 95, 96, 97, 98, 99 or 100% sequence identity to SEQ ID NO: 73 or the cDNA sequence thereof;
[0348] d) a polypeptide derived from SEQ ID NO: 24 by substitution, deletion or insertion of one or more amino acids;
[0349] e) a polypeptide derived from a mature polypeptide of SEQ ID NO: 24 by substitution, deletion or insertion of one or more amino acids;
[0350] f) a polypeptide derived from the polypeptide of any one of a) through e) wherein the N- and/or C-terminal end has been extended by the addition of one or more amino acids; and
[0351] g) a fragment of the polypeptide of any one of a) through f)
   wherein the polypeptide has endo-1,4-beta-xylanase activity.

[0352] In some embodiments, the protein is selected from the group consisting of:
[0353] a) a polypeptide having about/at least 60, 61, 62, 63, 64, 65, 66, 67, 68, 69, 70, 71, 72, 73, 74, 75, 76, 77, 78, 79, 80, 81, 82, 83, 84, 85, 86, 87, 88, 89, 90, 91, 92, 93, 94, 95, 96, 97, 98, 99 or 100% sequence identity to SEQ ID NO: 25;
[0354] b) a polypeptide having about/at least 60, 61, 62, 63, 64, 65, 66, 67, 68, 69, 70, 71, 72, 73, 74, 75, 76, 77, 78, 79, 80, 81, 82, 83, 84, 85, 86, 87, 88, 89, 90, 91, 92, 93, 94, 95, 96, 97, 98, 99 or 100% sequence identity to a mature polypeptide of SEQ ID NO: 25;
[0355] c) a polypeptide encoded by a polynucleotide having about/at least 60, 61, 62, 63, 64, 65, 66, 67, 68, 69, 70, 71, 72, 73, 74, 75, 76, 77, 78, 79, 80, 81, 82, 83, 84, 85, 86, 87, 88, 89, 90, 91, 92, 93, 94, 95, 96, 97, 98, 99 or 100% sequence identity to SEQ ID NO: 74 or the cDNA sequence thereof;
[0356] d) a polypeptide derived from SEQ ID NO: 25 by substitution, deletion or insertion of one or more amino acids;
[0357] e) a polypeptide derived from a mature polypeptide of SEQ ID NO: 25 by substitution, deletion or insertion of one or more amino acids;
[0358] f) a polypeptide derived from the polypeptide of any one of a) through e) wherein the N- and/or C-terminal end has been extended by the addition of one or more amino acids; and
[0359] g) a fragment of the polypeptide of any one of a) through f)
   wherein the polypeptide has dextranase activity.

[0360] In some embodiments, the protein is selected from the group consisting of:
[0361] a) a polypeptide having about/at least 60, 61, 62, 63, 64, 65, 66, 67, 68, 69, 70, 71, 72, 73, 74, 75, 76, 77, 78, 79, 80, 81, 82, 83, 84, 85, 86, 87, 88, 89, 90, 91, 92, 93, 94, 95, 96, 97, 98, 99 or 100% sequence identity to SEQ ID NO: 26;
[0362] b) a polypeptide having about/at least 60, 61, 62, 63, 64, 65, 66, 67, 68, 69, 70, 71, 72, 73, 74, 75, 76, 77, 78, 79, 80, 81, 82, 83, 84, 85, 86, 87, 88, 89, 90, 91, 92, 93, 94, 95, 96, 97, 98, 99 or 100% sequence identity to a mature polypeptide of SEQ ID NO: 26;
[0363] c) a polypeptide encoded by a polynucleotide having about/at least 60, 61, 62, 63, 64, 65, 66, 67, 68, 69, 70, 71, 72, 73, 74, 75, 76, 77, 78, 79, 80, 81, 82, 83, 84, 85, 86, 87, 88, 89, 90, 91, 92, 93, 94, 95, 96, 97, 98, 99 or 100% sequence identity to SEQ ID NO: 75 or the cDNA sequence thereof;
[0364] d) a polypeptide derived from SEQ ID NO: 26 by substitution, deletion or insertion of one or more amino acids;
[0365] e) a polypeptide derived from a mature polypeptide of SEQ ID NO: 26 by substitution, deletion or insertion of one or more amino acids;
[0366] f) a polypeptide derived from the polypeptide of any one of a) through e) wherein the N- and/or C-terminal end has been extended by the addition of one or more amino acids; and
[0367] g) a fragment of the polypeptide of any one of a) through f)
   wherein the polypeptide has lysozyme activity.

[0368] In some embodiments, the protein is selected from the group consisting of:
[0369] a) a polypeptide having about/at least 60, 61, 62, 63, 64, 65, 66, 67, 68, 69, 70, 71, 72, 73, 74, 75, 76, 77, 78, 79, 80, 81, 82, 83, 84, 85, 86, 87, 88, 89, 90, 91, 92, 93, 94, 95, 96, 97, 98, 99 or 100% sequence identity to SEQ ID NO: 27;
[0370] b) a polypeptide having about/at least 60, 61, 62, 63, 64, 65, 66, 67, 68, 69, 70, 71, 72, 73, 74, 75, 76, 77, 78, 79, 80, 81, 82, 83, 84, 85, 86, 87, 88, 89, 90, 91, 92, 93, 94, 95, 96, 97, 98, 99 or 100% sequence identity to a mature polypeptide of SEQ ID NO: 27;
[0371] c) a polypeptide encoded by a polynucleotide having about/at least 60, 61, 62, 63, 64, 65, 66, 67, 68, 69, 70, 71, 72, 73, 74, 75, 76, 77, 78, 79, 80, 81, 82, 83, 84, 85, 86, 87, 88, 89, 90, 91, 92, 93, 94, 95, 96, 97, 98, 99 or 100% sequence identity to SEQ ID NO: 76 or the cDNA sequence thereof;
[0372] d) a polypeptide derived from SEQ ID NO: 27 by substitution, deletion or insertion of one or more amino acids;
[0373] e) a polypeptide derived from a mature polypeptide of SEQ ID NO: 27 by substitution, deletion or insertion of one or more amino acids;
[0374] f) a polypeptide derived from the polypeptide of any one of a) through e) wherein the N- and/or C-terminal end has been extended by the addition of one or more amino acids; and
[0375] g) a fragment of the polypeptide of any one of a) through f)
   wherein the polypeptide has glucan endo-1,3-beta-glucosidase activity.

[0376] In some embodiments, the protein is selected from the group consisting of:
[0377] a) a polypeptide having about/at least 60, 61, 62, 63, 64, 65, 66, 67, 68, 69, 70, 71, 72, 73, 74, 75, 76, 77, 78, 79, 80, 81, 82, 83, 84, 85, 86, 87, 88, 89, 90, 91, 92, 93, 94, 95, 96, 97, 98, 99 or 100% sequence identity to SEQ ID NO: 28;
[0378] b) a polypeptide having about/at least 60, 61, 62, 63, 64, 65, 66, 67, 68, 69, 70, 71, 72, 73, 74, 75, 76, 77, 78, 79, 80, 81, 82, 83, 84, 85, 86, 87, 88, 89, 90, 91, 92, 93, 94, 95, 96, 97, 98, 99 or 100% sequence identity to a mature polypeptide of SEQ ID NO: 28;
[0379] c) a polypeptide encoded by a polynucleotide having about/at least 60, 61, 62, 63, 64, 65, 66, 67, 68, 69, 70, 71, 72, 73, 74, 75, 76, 77, 78, 79, 80, 81, 82, 83, 84, 85, 86, 87, 88, 89, 90, 91, 92, 93, 94, 95, 96, 97, 98, 99 or 100% sequence identity to SEQ ID NO: 77 or the cDNA sequence thereof;
[0380] d) a polypeptide derived from SEQ ID NO: 28 by substitution, deletion or insertion of one or more amino acids;
[0381] e) a polypeptide derived from a mature polypeptide of SEQ ID NO: 28 by substitution, deletion or insertion of one or more amino acids;
[0382] f) a polypeptide derived from the polypeptide of any one of a) through e) wherein the N- and/or C-terminal end has been extended by the addition of one or more amino acids; and
[0383] g) a fragment of the polypeptide of any one of a) through f)
   wherein the polypeptide has glucan endo-1,3-beta-glucosidase activity.

[0384] In some embodiments, the protein is selected from the group consisting of:
[0385] a) a polypeptide having about/at least 60, 61, 62, 63, 64, 65, 66, 67, 68, 69, 70, 71, 72, 73, 74, 75, 76, 77, 78, 79, 80, 81, 82, 83, 84, 85, 86, 87, 88, 89, 90, 91, 92, 93, 94, 95, 96, 97, 98, 99 or 100% sequence identity to SEQ ID NO: 29;
[0386] b) a polypeptide having about/at least 60, 61, 62, 63, 64, 65, 66, 67, 68, 69, 70, 71, 72, 73, 74, 75, 76, 77, 78, 79, 80, 81, 82, 83, 84, 85, 86, 87, 88, 89, 90, 91, 92, 93, 94, 95, 96, 97, 98, 99 or 100% sequence identity to a mature polypeptide of SEQ ID NO: 29;
[0387] c) a polypeptide encoded by a polynucleotide having about/at least 60, 61, 62, 63, 64, 65, 66, 67, 68, 69, 70, 71, 72, 73, 74, 75, 76, 77, 78, 79, 80, 81, 82, 83, 84, 85, 86, 87, 88, 89, 90, 91, 92, 93, 94, 95, 96, 97, 98, 99 or 100% sequence identity to SEQ ID NO: 78 or the cDNA sequence thereof;
[0388] d) a polypeptide derived from SEQ ID NO: 29 by substitution, deletion or insertion of one or more amino acids;
[0389] e) a polypeptide derived from a mature polypeptide of SEQ ID NO: 29 by substitution, deletion or insertion of one or more amino acids;
[0390] f) a polypeptide derived from the polypeptide of any one of a) through e) wherein the N- and/or C-terminal end has been extended by the addition of one or more amino acids; and
[0391] g) a fragment of the polypeptide of any one of a) through f)
   wherein the polypeptide has pullulanase activity.

[0392] In some embodiments, the protein is selected from the group consisting of:
[0393] a) a polypeptide having about/at least 60, 61, 62, 63, 64, 65, 66, 67, 68, 69, 70, 71, 72, 73, 74, 75, 76, 77, 78, 79, 80, 81, 82, 83, 84, 85, 86, 87, 88, 89, 90, 91, 92, 93, 94, 95, 96, 97, 98, 99 or 100% sequence identity to SEQ ID NO: 30;
[0394] b) a polypeptide having about/at least 60, 61, 62, 63, 64, 65, 66, 67, 68, 69, 70, 71, 72, 73, 74, 75, 76, 77, 78, 79, 80, 81, 82, 83, 84, 85, 86, 87, 88, 89, 90, 91, 92, 93, 94, 95, 96, 97, 98, 99 or 100% sequence identity to a mature polypeptide of SEQ ID NO: 30;
[0395] c) a polypeptide encoded by a polynucleotide having about/at least 60, 61, 62, 63, 64, 65, 66, 67, 68, 69, 70, 71, 72, 73, 74, 75, 76, 77, 78, 79, 80, 81, 82, 83, 84, 85, 86, 87, 88, 89, 90, 91, 92, 93, 94, 95, 96, 97, 98, 99 or 100% sequence identity to SEQ ID NO: 79 or the cDNA sequence thereof;
[0396] d) a polypeptide derived from SEQ ID NO: 30 by substitution, deletion or insertion of one or more amino acids;
[0397] e) a polypeptide derived from a mature polypeptide of SEQ ID NO: 30 by substitution, deletion or insertion of one or more amino acids;
[0398] f) a polypeptide derived from the polypeptide of any one of a) through e) wherein the N- and/or C-terminal end has been extended by the addition of one or more amino acids; and
[0399] g) a fragment of the polypeptide of any one of a) through f)
   wherein the polypeptide has glucan endo-1,3-alpha-glucosidase activity.

[0400] In some embodiments, the protein is selected from the group consisting of:
[0401] a) a polypeptide having about/at least 60, 61, 62, 63, 64, 65, 66, 67, 68, 69, 70, 71, 72, 73, 74, 75, 76, 77, 78, 79, 80, 81, 82, 83, 84, 85, 86, 87, 88, 89, 90, 91, 92, 93, 94, 95, 96, 97, 98, 99 or 100% sequence identity to SEQ ID NO: 31;
[0402] b) a polypeptide having about/at least 60, 61, 62, 63, 64, 65, 66, 67, 68, 69, 70, 71, 72, 73, 74, 75, 76, 77, 78, 79, 80, 81, 82, 83, 84, 85, 86, 87, 88, 89, 90, 91, 92, 93, 94, 95, 96, 97, 98, 99 or 100% sequence identity to a mature polypeptide of SEQ ID NO: 31;
[0403] c) a polypeptide encoded by a polynucleotide having about/at least 60, 61, 62, 63, 64, 65, 66, 67, 68, 69, 70, 71, 72, 73, 74, 75, 76, 77, 78, 79, 80, 81, 82, 83, 84, 85, 86, 87, 88, 89, 90, 91, 92, 93, 94, 95, 96, 97, 98, 99 or 100% sequence identity to SEQ ID NO: 80 or the cDNA sequence thereof;
[0404] d) a polypeptide derived from SEQ ID NO: 31 by substitution, deletion or insertion of one or more amino acids;
[0405] e) a polypeptide derived from a mature polypeptide of SEQ ID NO: 31 by substitution, deletion or insertion of one or more amino acids;
[0406] f) a polypeptide derived from the polypeptide of any one of a) through e) wherein the N- and/or C-terminal end has been extended by the addition of one or more amino acids; and
[0407] g) a fragment of the polypeptide of any one of a) through f)
   wherein the polypeptide has glucan endo-1,6-beta-glucosidase activity.

[0408] In some embodiments, the protein is selected from the group consisting of:
[0409] a) a polypeptide having about/at least 60, 61, 62, 63, 64, 65, 66, 67, 68, 69, 70, 71, 72, 73, 74, 75, 76, 77, 78, 79, 80, 81, 82, 83, 84, 85, 86, 87, 88, 89, 90, 91, 92, 93, 94, 95, 96, 97, 98, 99 or 100% sequence identity to SEQ ID NO: 32;
[0410] b) a polypeptide having about/at least 60, 61, 62, 63, 64, 65, 66, 67, 68, 69, 70, 71, 72, 73, 74, 75, 76, 77, 78, 79, 80, 81, 82, 83, 84, 85, 86, 87, 88, 89, 90, 91, 92, 93, 94, 95, 96, 97, 98, 99 or 100% sequence identity to a mature polypeptide of SEQ ID NO: 32;
[0411] c) a polypeptide encoded by a polynucleotide having about/at least 60, 61, 62, 63, 64, 65, 66, 67, 68, 69, 70, 71, 72, 73, 74, 75, 76, 77, 78, 79, 80, 81, 82, 83, 84, 85, 86, 87, 88, 89, 90, 91, 92, 93, 94, 95, 96, 97, 98, 99 or 100% sequence identity to SEQ ID NO: 81 or the cDNA sequence thereof;
[0412] d) a polypeptide derived from SEQ ID NO: 32 by substitution, deletion or insertion of one or more amino acids;
[0413] e) a polypeptide derived from a mature polypeptide of SEQ ID NO: 32 by substitution, deletion or insertion of one or more amino acids;
[0414] f) a polypeptide derived from the polypeptide of any one of a) through e) wherein the N- and/or C-terminal end has been extended by the addition of one or more amino acids; and
[0415] g) a fragment of the polypeptide of any one of a) through f)
   wherein the polypeptide has glucan endo-1,6-beta-glucosidase activity.

[0416] In some embodiments, the protein is selected from the group consisting of:
[0417] a) a polypeptide having about/at least 60, 61, 62, 63, 64, 65, 66, 67, 68, 69, 70, 71, 72, 73, 74, 75, 76, 77, 78, 79, 80, 81, 82, 83, 84, 85, 86, 87, 88, 89, 90, 91, 92, 93, 94, 95, 96, 97, 98, 99 or 100% sequence identity to SEQ ID NO: 33;
[0418] b) a polypeptide having about/at least 60, 61, 62, 63, 64, 65, 66, 67, 68, 69, 70, 71, 72, 73, 74, 75, 76, 77, 78, 79, 80, 81, 82, 83, 84, 85, 86, 87, 88, 89, 90, 91, 92, 93, 94, 95, 96, 97, 98, 99 or 100% sequence identity to a mature polypeptide of SEQ ID NO: 33;
[0419] c) a polypeptide encoded by a polynucleotide having about/at least 60, 61, 62, 63, 64, 65, 66, 67, 68, 69, 70, 71, 72, 73, 74, 75, 76, 77, 78, 79, 80, 81, 82, 83, 84, 85, 86, 87, 88, 89, 90, 91, 92, 93, 94, 95, 96, 97, 98, 99 or 100% sequence identity to SEQ ID NO: 82 or the cDNA sequence thereof;
[0420] d) a polypeptide derived from SEQ ID NO: 33 by substitution, deletion or insertion of one or more amino acids;
[0421] e) a polypeptide derived from a mature polypeptide of SEQ ID NO: 33 by substitution, deletion or insertion of one or more amino acids;
[0422] f) a polypeptide derived from the polypeptide of any one of a) through e) wherein the N- and/or C-terminal end has been extended by the addition of one or more amino acids; and
[0423] g) a fragment of the polypeptide of any one of a) through f)
   wherein the polypeptide has mannan endo-1,4-beta-gluco-mannosidase activity.

[0424] In some embodiments, the protein is selected from the group consisting of:
[0425] a) a polypeptide having about/at least 60, 61, 62, 63, 64, 65, 66, 67, 68, 69, 70, 71, 72, 73, 74, 75, 76, 77, 78, 79, 80, 81, 82, 83, 84, 85, 86, 87, 88, 89, 90, 91, 92, 93, 94, 95, 96, 97, 98, 99 or 100% sequence identity to SEQ ID NO: 34;
[0426] b) a polypeptide having about/at least 60, 61, 62, 63, 64, 65, 66, 67, 68, 69, 70, 71, 72, 73, 74, 75, 76, 77, 78, 79, 80, 81, 82, 83, 84, 85, 86, 87, 88, 89, 90, 91, 92, 93, 94, 95, 96, 97, 98, 99 or 100% sequence identity to a mature polypeptide of SEQ ID NO: 34;
[0427] c) a polypeptide encoded by a polynucleotide having about/at least 60, 61, 62, 63, 64, 65, 66, 67, 68, 69, 70, 71, 72, 73, 74, 75, 76, 77, 78, 79, 80, 81, 82, 83, 84, 85, 86, 87, 88, 89, 90, 91, 92, 93, 94, 95, 96, 97, 98, 99 or 100% sequence identity to SEQ ID NO: 83 or the cDNA sequence thereof;
[0428] d) a polypeptide derived from SEQ ID NO: 34 by substitution, deletion or insertion of one or more amino acids;
[0429] e) a polypeptide derived from a mature polypeptide of SEQ ID NO: 34 by substitution, deletion or insertion of one or more amino acids;
[0430] f) a polypeptide derived from the polypeptide of any one of a) through e) wherein the N- and/or C-terminal end has been extended by the addition of one or more amino acids; and
[0431] g) a fragment of the polypeptide of any one of a) through f)
   wherein the polypeptide has mannan endo-1,6-alpha-gluco-mannosidase activity.

[0432] In some embodiments, the protein is selected from the group consisting of:
[0433] a) a polypeptide having about/at least 60, 61, 62, 63, 64, 65, 66, 67, 68, 69, 70, 71, 72, 73, 74, 75, 76, 77, 78, 79, 80, 81, 82, 83, 84, 85, 86, 87, 88, 89, 90, 91, 92, 93, 94, 95, 96, 97, 98, 99 or 100% sequence identity to SEQ ID NO: 35;
[0434] b) a polypeptide having about/at least 60, 61, 62, 63, 64, 65, 66, 67, 68, 69, 70, 71, 72, 73, 74, 75, 76, 77, 78, 79, 80, 81, 82, 83, 84, 85, 86, 87, 88, 89, 90, 91, 92, 93, 94, 95, 96, 97, 98, 99 or 100% sequence identity to a mature polypeptide of SEQ ID NO: 35;
[0435] c) a polypeptide encoded by a polynucleotide having about/at least 60, 61, 62, 63, 64, 65, 66, 67, 68, 69, 70, 71, 72, 73, 74, 75, 76, 77, 78, 79, 80, 81, 82, 83, 84, 85, 86, 87, 88, 89, 90, 91, 92, 93, 94, 95, 96, 97, 98, 99 or 100% sequence identity to SEQ ID NO: 84 or the cDNA sequence thereof;
[0436] d) a polypeptide derived from SEQ ID NO: 35 by substitution, deletion or insertion of one or more amino acids;
[0437] e) a polypeptide derived from a mature polypeptide of SEQ ID NO: 35 by substitution, deletion or insertion of one or more amino acids;
[0438] f) a polypeptide derived from the polypeptide of any one of a) through e) wherein the N- and/or C-terminal end has been extended by the addition of one or more amino acids; and
[0439] g) a fragment of the polypeptide of any one of a) through f)
   wherein the polypeptide has endogalactosaminidase activity.

[0440] In some embodiments, the protein is selected from the group consisting of:
[0441] a) a polypeptide having about/at least 60, 61, 62, 63, 64, 65, 66, 67, 68, 69, 70, 71, 72, 73, 74, 75, 76, 77, 78, 79, 80, 81, 82, 83, 84, 85, 86, 87, 88, 89, 90, 91, 92, 93, 94, 95, 96, 97, 98, 99 or 100% sequence identity to SEQ ID NO: 36;
[0442] b) a polypeptide having about/at least 60, 61, 62, 63, 64, 65, 66, 67, 68, 69, 70, 71, 72, 73, 74, 75, 76, 77, 78, 79, 80, 81, 82, 83, 84, 85, 86, 87, 88, 89, 90, 91, 92, 93, 94, 95, 96, 97, 98, 99 or 100% sequence identity to a mature polypeptide of SEQ ID NO: 36;
[0443] c) a polypeptide encoded by a polynucleotide having about/at least 60, 61, 62, 63, 64, 65, 66, 67, 68, 69, 70, 71, 72, 73, 74, 75, 76, 77, 78, 79, 80, 81, 82, 83, 84, 85, 86, 87, 88, 89, 90, 91, 92, 93, 94, 95, 96, 97, 98, 99 or 100% sequence identity to SEQ ID NO: 85 or the cDNA sequence thereof;
[0444] d) a polypeptide derived from SEQ ID NO: 36 by substitution, deletion or insertion of one or more amino acids;
[0445] e) a polypeptide derived from a mature polypeptide of SEQ ID NO: 36 by substitution, deletion or insertion of one or more amino acids;
[0446] f) a polypeptide derived from the polypeptide of any one of a) through e) wherein the N- and/or C-terminal end has been extended by the addition of one or more amino acids; and
[0447] g) a fragment of the polypeptide of any one of a) through f)
   wherein the polypeptide has endogalactosaminidase activity.

[0448] In some embodiments, the protein is selected from the group consisting of:
[0449] a) a polypeptide having about/at least 60, 61, 62, 63, 64, 65, 66, 67, 68, 69, 70, 71, 72, 73, 74, 75, 76, 77, 78, 79, 80, 81, 82, 83, 84, 85, 86, 87, 88, 89, 90, 91, 92, 93, 94, 95, 96, 97, 98, 99 or 100% sequence identity to SEQ ID NO: 37;
[0450] b) a polypeptide having about/at least 60, 61, 62, 63, 64, 65, 66, 67, 68, 69, 70, 71, 72, 73, 74, 75, 76, 77, 78, 79, 80, 81, 82, 83, 84, 85, 86, 87, 88, 89, 90, 91, 92, 93, 94, 95, 96, 97, 98, 99 or 100% sequence identity to a mature polypeptide of SEQ ID NO: 37;
[0451] c) a polypeptide encoded by a polynucleotide having about/at least 60, 61, 62, 63, 64, 65, 66, 67, 68, 69, 70, 71, 72, 73, 74, 75, 76, 77, 78, 79, 80, 81, 82, 83, 84, 85, 86, 87, 88, 89, 90, 91, 92, 93, 94, 95, 96, 97, 98, 99 or 100% sequence identity to SEQ ID NO: 86 or the cDNA sequence thereof;
[0452] d) a polypeptide derived from SEQ ID NO: 37 by substitution, deletion or insertion of one or more amino acids;
[0453] e) a polypeptide derived from a mature polypeptide of SEQ ID NO: 37 by substitution, deletion or insertion of one or more amino acids;
[0454] f) a polypeptide derived from the polypeptide of any one of a) through e) wherein the N- and/or C-terminal end has been extended by the addition of one or more amino acids; and
[0455] g) a fragment of the polypeptide of any one of a) through f)
   wherein the polypeptide has endogalactosaminidase activity.

[0456] In some embodiments, the protein is selected from the group consisting of:
[0457] a) a polypeptide having about/at least 60, 61, 62, 63, 64, 65, 66, 67, 68, 69, 70, 71, 72, 73, 74, 75, 76, 77, 78, 79, 80, 81, 82, 83, 84, 85, 86, 87, 88, 89, 90, 91, 92, 93, 94, 95, 96, 97, 98, 99 or 100% sequence identity to SEQ ID NO: 38;
[0458] b) a polypeptide having about/at least 60, 61, 62, 63, 64, 65, 66, 67, 68, 69, 70, 71, 72, 73, 74, 75, 76, 77, 78, 79, 80, 81, 82, 83, 84, 85, 86, 87, 88, 89, 90, 91, 92, 93, 94, 95, 96, 97, 98, 99 or 100% sequence identity to a mature polypeptide of SEQ ID NO: 38;
[0459] c) a polypeptide encoded by a polynucleotide having about/at least 60, 61, 62, 63, 64, 65, 66, 67, 68, 69, 70, 71, 72, 73, 74, 75, 76, 77, 78, 79, 80, 81, 82, 83, 84, 85, 86, 87, 88, 89, 90, 91, 92, 93, 94, 95, 96, 97, 98, 99 or 100% sequence identity to SEQ ID NO: 87 or the cDNA sequence thereof;
[0460] d) a polypeptide derived from SEQ ID NO: 38 by substitution, deletion or insertion of one or more amino acids;
[0461] e) a polypeptide derived from a mature polypeptide of SEQ ID NO: 38 by substitution, deletion or insertion of one or more amino acids;
[0462] f) a polypeptide derived from the polypeptide of any one of a) through e) wherein the N- and/or C-terminal end has been extended by the addition of one or more amino acids; and
[0463] g) a fragment of the polypeptide of any one of a) through f)
   wherein the polypeptide has endogalactosaminidase activity.

[0464] In some embodiments, the protein is selected from the group consisting of:
[0465] a) a polypeptide having about/at least 60, 61, 62, 63, 64, 65, 66, 67, 68, 69, 70, 71, 72, 73, 74, 75, 76, 77, 78, 79, 80, 81, 82, 83, 84, 85, 86, 87, 88, 89, 90, 91, 92, 93, 94, 95, 96, 97, 98, 99 or 100% sequence identity to SEQ ID NO: 39;
[0466] b) a polypeptide having about/at least 60, 61, 62, 63, 64, 65, 66, 67, 68, 69, 70, 71, 72, 73, 74, 75, 76, 77, 78, 79, 80, 81, 82, 83, 84, 85, 86, 87, 88, 89, 90, 91, 92, 93, 94, 95, 96, 97, 98, 99 or 100% sequence identity to a mature polypeptide of SEQ ID NO: 39;
[0467] c) a polypeptide encoded by a polynucleotide having about/at least 60, 61, 62, 63, 64, 65, 66, 67, 68, 69, 70, 71, 72, 73, 74, 75, 76, 77, 78, 79, 80, 81, 82, 83, 84, 85, 86, 87, 88, 89, 90, 91, 92, 93, 94, 95, 96, 97, 98, 99 or 100% sequence identity to SEQ ID NO: 88 or the cDNA sequence thereof;
[0468] d) a polypeptide derived from SEQ ID NO: 39 by substitution, deletion or insertion of one or more amino acids;
[0469] e) a polypeptide derived from a mature polypeptide of SEQ ID NO: 39 by substitution, deletion or insertion of one or more amino acids;
[0470] f) a polypeptide derived from the polypeptide of any one of a) through e) wherein the N- and/or C-terminal end has been extended by the addition of one or more amino acids; and
[0471] g) a fragment of the polypeptide of any one of a) through f)
   wherein the polypeptide has endogalactosaminidase activity.

[0472] In some embodiments, the protein is selected from the group consisting of:
[0473] a) a polypeptide having about/at least 60, 61, 62, 63, 64, 65, 66, 67, 68, 69, 70, 71, 72, 73, 74, 75, 76, 77, 78, 79, 80, 81, 82, 83, 84, 85, 86, 87, 88, 89, 90, 91, 92, 93, 94, 95, 96, 97, 98, 99 or 100% sequence identity to SEQ ID NO: 40;
[0474] b) a polypeptide having about/at least 60, 61, 62, 63, 64, 65, 66, 67, 68, 69, 70, 71, 72, 73, 74, 75, 76, 77, 78, 79, 80, 81, 82, 83, 84, 85, 86, 87, 88, 89, 90, 91, 92, 93, 94, 95, 96, 97, 98, 99 or 100% sequence identity to a mature polypeptide of SEQ ID NO: 40;
[0475] c) a polypeptide encoded by a polynucleotide having about/at least 60, 61, 62, 63, 64, 65, 66, 67, 68, 69, 70, 71, 72, 73, 74, 75, 76, 77, 78, 79, 80, 81, 82, 83, 84, 85, 86, 87, 88, 89, 90, 91, 92, 93, 94, 95, 96, 97, 98, 99 or 100% sequence identity to SEQ ID NO: 89 or the cDNA sequence thereof;
[0476] d) a polypeptide derived from SEQ ID NO: 40 by substitution, deletion or insertion of one or more amino acids;
[0477] e) a polypeptide derived from a mature polypeptide of SEQ ID NO: 40 by substitution, deletion or insertion of one or more amino acids;
[0478] f) a polypeptide derived from the polypeptide of any one of a) through e) wherein the N- and/or C-terminal end has been extended by the addition of one or more amino acids; and
[0479] g) a fragment of the polypeptide of any one of a) through f)
   wherein the polypeptide has endogalactosaminidase activity.

[0480] In some embodiments, the protein is selected from the group consisting of:
[0481] a) a polypeptide having about/at least 60, 61, 62, 63, 64, 65, 66, 67, 68, 69, 70, 71, 72, 73, 74, 75, 76, 77, 78, 79, 80, 81, 82, 83, 84, 85, 86, 87, 88, 89, 90, 91, 92, 93, 94, 95, 96, 97, 98, 99 or 100% sequence identity to SEQ ID NO: 41;
[0482] b) a polypeptide having about/at least 60, 61, 62, 63, 64, 65, 66, 67, 68, 69, 70, 71, 72, 73, 74, 75, 76, 77, 78, 79, 80, 81, 82, 83, 84, 85, 86, 87, 88, 89, 90, 91, 92, 93, 94, 95, 96, 97, 98, 99 or 100% sequence identity to a mature polypeptide of SEQ ID NO: 41;
[0483] c) a polypeptide encoded by a polynucleotide having about/at least 60, 61, 62, 63, 64, 65, 66, 67, 68, 69, 70, 71, 72, 73, 74, 75, 76, 77, 78, 79, 80, 81, 82, 83, 84, 85, 86, 87, 88, 89, 90, 91, 92, 93, 94, 95, 96, 97, 98, 99 or 100% sequence identity to SEQ ID NO: 90 or the cDNA sequence thereof;
[0484] d) a polypeptide derived from SEQ ID NO: 41 by substitution, deletion or insertion of one or more amino acids;
[0485] e) a polypeptide derived from a mature polypeptide of SEQ ID NO: 41 by substitution, deletion or insertion of one or more amino acids;
[0486] f) a polypeptide derived from the polypeptide of any one of a) through e) wherein the N- and/or C-terminal end has been extended by the addition of one or more amino acids; and
[0487] g) a fragment of the polypeptide of any one of a) through f)
   wherein the polypeptide has glucan 1,4-alpha-maltohydrolase activity.

[0488] In some embodiments, the protein is selected from the group consisting of:
[0489] a) a polypeptide having about/at least 60, 61, 62, 63, 64, 65, 66, 67, 68, 69, 70, 71, 72, 73, 74, 75, 76, 77, 78, 79, 80, 81, 82, 83, 84, 85, 86, 87, 88, 89, 90, 91, 92, 93, 94, 95, 96, 97, 98, 99 or 100% sequence identity to SEQ ID NO: 42;
[0490] b) a polypeptide having about/at least 60, 61, 62, 63, 64, 65, 66, 67, 68, 69, 70, 71, 72, 73, 74, 75, 76, 77, 78, 79, 80, 81, 82, 83, 84, 85, 86, 87, 88, 89, 90, 91, 92, 93, 94, 95, 96, 97, 98, 99 or 100% sequence identity to a mature polypeptide of SEQ ID NO: 42;
[0491] c) a polypeptide encoded by a polynucleotide having about/at least 60, 61, 62, 63, 64, 65, 66, 67, 68, 69, 70, 71, 72, 73, 74, 75, 76, 77, 78, 79, 80, 81, 82, 83, 84, 85, 86, 87, 88, 89, 90, 91, 92, 93, 94, 95, 96, 97, 98, 99 or 100% sequence identity to SEQ ID NO: 91 or the cDNA sequence thereof;
[0492] d) a polypeptide derived from SEQ ID NO: 42 by substitution, deletion or insertion of one or more amino acids;
[0493] e) a polypeptide derived from a mature polypeptide of SEQ ID NO: 42 by substitution, deletion or insertion of one or more amino acids;
[0494] f) a polypeptide derived from the polypeptide of any one of a) through e) wherein the N- and/or C-terminal end has been extended by the addition of one or more amino acids; and
[0495] g) a fragment of the polypeptide of any one of a) through f)
   wherein the polypeptide has serine endopeptidase activity.

[0496] In some embodiments, the protein is selected from the group consisting of:
[0497] a) a polypeptide having about/at least 60, 61, 62, 63, 64, 65, 66, 67, 68, 69, 70, 71, 72, 73, 74, 75, 76, 77, 78, 79, 80, 81, 82, 83, 84, 85, 86, 87, 88, 89, 90, 91, 92, 93, 94, 95, 96, 97, 98, 99 or 100% sequence identity to SEQ ID NO: 43;
[0498] b) a polypeptide having about/at least 60, 61, 62, 63, 64, 65, 66, 67, 68, 69, 70, 71, 72, 73, 74, 75, 76, 77, 78, 79, 80, 81, 82, 83, 84, 85, 86, 87, 88, 89, 90, 91, 92, 93, 94, 95, 96, 97, 98, 99 or 100% sequence identity to a mature polypeptide of SEQ ID NO: 43;
[0499] c) a polypeptide encoded by a polynucleotide having about/at least 60, 61, 62, 63, 64, 65, 66, 67, 68, 69, 70, 71, 72, 73, 74, 75, 76, 77, 78, 79, 80, 81, 82, 83, 84, 85, 86, 87, 88, 89, 90, 91, 92, 93, 94, 95, 96, 97, 98, 99 or 100% sequence identity to SEQ ID NO: 92 or the cDNA sequence thereof;
[0500] d) a polypeptide derived from SEQ ID NO: 43 by substitution, deletion or insertion of one or more amino acids;
[0501] e) a polypeptide derived from a mature polypeptide of SEQ ID NO: 43 by substitution, deletion or insertion of one or more amino acids;
[0502] f) a polypeptide derived from the polypeptide of any one of a) through e) wherein the N- and/or C-terminal end has been extended by the addition of one or more amino acids; and
[0503] g) a fragment of the polypeptide of any one of a) through f)
   wherein the polypeptide has glutamyl endopeptidase activity.

[0504] In some embodiments, the protein is selected from the group consisting of:
[0505] a) a polypeptide having about/at least 60, 61, 62, 63, 64, 65, 66, 67, 68, 69, 70, 71, 72, 73, 74, 75, 76, 77, 78, 79, 80, 81, 82, 83, 84, 85, 86, 87, 88, 89, 90, 91, 92, 93, 94, 95, 96, 97, 98, 99 or 100% sequence identity to SEQ ID NO: 44;
[0506] b) a polypeptide having about/at least 60, 61, 62, 63, 64, 65, 66, 67, 68, 69, 70, 71, 72, 73, 74, 75, 76, 77, 78, 79, 80, 81, 82, 83, 84, 85, 86, 87, 88, 89, 90, 91, 92, 93, 94, 95, 96, 97, 98, 99 or 100% sequence identity to a mature polypeptide of SEQ ID NO: 44;
[0507] c) a polypeptide encoded by a polynucleotide having about/at least 60, 61, 62, 63, 64, 65, 66, 67, 68, 69, 70, 71, 72, 73, 74, 75, 76, 77, 78, 79, 80, 81, 82, 83, 84, 85, 86, 87, 88, 89, 90, 91, 92, 93, 94, 95, 96, 97, 98, 99 or 100% sequence identity to SEQ ID NO: 93 or the cDNA sequence thereof;
[0508] d) a polypeptide derived from SEQ ID NO: 44 by substitution, deletion or insertion of one or more amino acids;
[0509] e) a polypeptide derived from a mature polypeptide of SEQ ID NO: 44 by substitution, deletion or insertion of one or more amino acids;
[0510] f) a polypeptide derived from the polypeptide of any one of a) through e) wherein the N- and/or C-terminal end has been extended by the addition of one or more amino acids; and
[0511] g) a fragment of the polypeptide of any one of a) through f)
   wherein the polypeptide has subtilisin activity.

[0512] In some embodiments, the protein is selected from the group consisting of:
[0513] a) a polypeptide having about/at least 60, 61, 62, 63, 64, 65, 66, 67, 68, 69, 70, 71, 72, 73, 74, 75, 76, 77, 78, 79, 80, 81, 82, 83, 84, 85, 86, 87, 88, 89, 90, 91, 92, 93, 94, 95, 96, 97, 98, 99 or 100% sequence identity to SEQ ID NO: 45;
[0514] b) a polypeptide having about/at least 60, 61, 62, 63, 64, 65, 66, 67, 68, 69, 70, 71, 72, 73, 74, 75, 76, 77, 78, 79, 80, 81, 82, 83, 84, 85, 86, 87, 88, 89, 90, 91, 92, 93, 94, 95, 96, 97, 98, 99 or 100% sequence identity to a mature polypeptide of SEQ ID NO: 45;
[0515] c) a polypeptide encoded by a polynucleotide having about/at least 60, 61, 62, 63, 64, 65, 66, 67, 68, 69, 70, 71, 72, 73, 74, 75, 76, 77, 78, 79, 80, 81, 82, 83, 84, 85, 86, 87, 88, 89, 90, 91, 92, 93, 94, 95, 96, 97, 98, 99 or 100% sequence identity to SEQ ID NO: 94 or the cDNA sequence thereof;
[0516] d) a polypeptide derived from SEQ ID NO: 45 by substitution, deletion or insertion of one or more amino acids;
[0517] e) a polypeptide derived from a mature polypeptide of SEQ ID NO: 45 by substitution, deletion or insertion of one or more amino acids;
[0518] f) a polypeptide derived from the polypeptide of any one of a) through e) wherein the N- and/or C-terminal end has been extended by the addition of one or more amino acids; and
[0519] g) a fragment of the polypeptide of any one of a) through f)
   wherein the polypeptide has subtilisin activity.

[0520] In some embodiments, the protein is selected from the group consisting of:
[0521] a) a polypeptide having about/at least 60, 61, 62, 63, 64, 65, 66, 67, 68, 69, 70, 71, 72, 73, 74, 75, 76, 77, 78, 79, 80, 81, 82, 83, 84, 85, 86, 87, 88, 89, 90, 91, 92, 93, 94, 95, 96, 97, 98, 99 or 100% sequence identity to SEQ ID NO: 46;
[0522] b) a polypeptide having about/at least 60, 61, 62, 63, 64, 65, 66, 67, 68, 69, 70, 71, 72, 73, 74, 75, 76, 77, 78, 79, 80, 81, 82, 83, 84, 85, 86, 87, 88, 89, 90, 91, 92, 93, 94, 95, 96, 97, 98, 99 or 100% sequence identity to a mature polypeptide of SEQ ID NO: 46;
[0523] c) a polypeptide encoded by a polynucleotide having about/at least 60, 61, 62, 63, 64, 65, 66, 67, 68, 69, 70, 71, 72, 73, 74, 75, 76, 77, 78, 79, 80, 81, 82, 83, 84, 85, 86, 87, 88, 89, 90, 91, 92, 93, 94, 95, 96, 97, 98, 99 or 100% sequence identity to SEQ ID NO: 95 or the cDNA sequence thereof;
[0524] d) a polypeptide derived from SEQ ID NO: 46 by substitution, deletion or insertion of one or more amino acids;
[0525] e) a polypeptide derived from a mature polypeptide of SEQ ID NO: 46 by substitution, deletion or insertion of one or more amino acids;
[0526] f) a polypeptide derived from the polypeptide of any one of a) through e) wherein the N- and/or C-terminal end has been extended by the addition of one or more amino acids; and
[0527] g) a fragment of the polypeptide of any one of a) through f)
   wherein the polypeptide has subtilisin activity.

[0528] In some embodiments, the protein is selected from the group consisting of:
[0529] a) a polypeptide having about/at least 60, 61, 62, 63, 64, 65, 66, 67, 68, 69, 70, 71, 72, 73, 74, 75, 76, 77, 78, 79, 80, 81, 82, 83, 84, 85, 86, 87, 88, 89, 90, 91, 92, 93, 94, 95, 96, 97, 98, 99 or 100% sequence identity to SEQ ID NO: 47;
[0530] b) a polypeptide having about/at least 60, 61, 62, 63, 64, 65, 66, 67, 68, 69, 70, 71, 72, 73, 74, 75, 76, 77, 78, 79, 80, 81, 82, 83, 84, 85, 86, 87, 88, 89, 90, 91, 92, 93, 94, 95, 96, 97, 98, 99 or 100% sequence identity to a mature polypeptide of SEQ ID NO: 47;
[0531] c) a polypeptide encoded by a polynucleotide having about/at least 60, 61, 62, 63, 64, 65, 66, 67, 68, 69, 70, 71, 72, 73, 74, 75, 76, 77, 78, 79, 80, 81, 82, 83, 84, 85, 86, 87, 88, 89, 90, 91, 92, 93, 94, 95, 96, 97, 98, 99 or 100% sequence identity to SEQ ID NO: 96 or the cDNA sequence thereof;
[0532] d) a polypeptide derived from SEQ ID NO: 47 by substitution, deletion or insertion of one or more amino acids;
[0533] e) a polypeptide derived from a mature polypeptide of SEQ ID NO: 47 by substitution, deletion or insertion of one or more amino acids;
[0534] f) a polypeptide derived from the polypeptide of any one of a) through e) wherein the N- and/or C-terminal end has been extended by the addition of one or more amino acids; and
[0535] g) a fragment of the polypeptide of any one of a) through f)
   wherein the polypeptide has subtilisin activity.

[0536] In some embodiments, the protein is selected from the group consisting of:
[0537] a) a polypeptide having about/at least 60, 61, 62, 63, 64, 65, 66, 67, 68, 69, 70, 71, 72, 73, 74, 75, 76, 77, 78, 79, 80, 81, 82, 83, 84, 85, 86, 87, 88, 89, 90, 91, 92, 93, 94, 95, 96, 97, 98, 99 or 100% sequence identity to SEQ ID NO: 48;
[0538] b) a polypeptide having about/at least 60, 61, 62, 63, 64, 65, 66, 67, 68, 69, 70, 71, 72, 73, 74, 75, 76, 77, 78, 79, 80, 81, 82, 83, 84, 85, 86, 87, 88, 89, 90, 91, 92, 93, 94, 95, 96, 97, 98, 99 or 100% sequence identity to a mature polypeptide of SEQ ID NO: 48;
[0539] c) a polypeptide encoded by a polynucleotide having about/at least 60, 61, 62, 63, 64, 65, 66, 67, 68, 69, 70, 71, 72, 73, 74, 75, 76, 77, 78, 79, 80, 81, 82, 83, 84, 85, 86, 87, 88, 89, 90, 91, 92, 93, 94, 95, 96, 97, 98, 99 or 100% sequence identity to SEQ ID NO: 97 or the cDNA sequence thereof;
[0540] d) a polypeptide derived from SEQ ID NO: 48 by substitution, deletion or insertion of one or more amino acids;
[0541] e) a polypeptide derived from a mature polypeptide of SEQ ID NO: 48 by substitution, deletion or insertion of one or more amino acids;
[0542] f) a polypeptide derived from the polypeptide of any one of a) through e) wherein the N- and/or C-terminal end has been extended by the addition of one or more amino acids; and
[0543] g) a fragment of the polypeptide of any one of a) through f)
   wherein the polypeptide has bacillolysin activity.

[0544] In some embodiments, the protein is selected from the group consisting of:
[0545] a) a polypeptide having about/at least 60, 61, 62, 63, 64, 65, 66, 67, 68, 69, 70, 71, 72, 73, 74, 75, 76, 77, 78, 79, 80, 81, 82, 83, 84, 85, 86, 87, 88, 89, 90, 91, 92, 93, 94, 95, 96, 97, 98, 99 or 100% sequence identity to SEQ ID NO: 98;
[0546] b) a polypeptide having about/at least 60, 61, 62, 63, 64, 65, 66, 67, 68, 69, 70, 71, 72, 73, 74, 75, 76, 77, 78, 79, 80, 81, 82, 83, 84, 85, 86, 87, 88, 89, 90, 91, 92, 93, 94, 95, 96, 97, 98, 99 or 100% sequence identity to a mature polypeptide of SEQ ID NO: 98;
[0547] c) a polypeptide encoded by a polynucleotide having about/at least 60, 61, 62, 63, 64, 65, 66, 67, 68, 69, 70, 71, 72, 73, 74, 75, 76, 77, 78, 79, 80, 81, 82, 83, 84, 85, 86, 87, 88, 89, 90, 91, 92, 93, 94, 95, 96, 97, 98, 99 or 100% sequence identity to SEQ ID NO: 151 or the cDNA sequence thereof;
[0548] d) a polypeptide derived from SEQ ID NO: 98 by substitution, deletion or insertion of one or more amino acids;
[0549] e) a polypeptide derived from a mature polypeptide of SEQ ID NO: 98 by substitution, deletion or insertion of one or more amino acids;
[0550] f) a polypeptide derived from the polypeptide of any one of a) through e) wherein the N- and/or C-terminal end has been extended by the addition of one or more amino acids; and
[0551] g) a fragment of the polypeptide of any one of a) through f)
   wherein the polypeptide has lytic cellulose monooxygenase activity.

[0552] In some embodiments, the protein is selected from the group consisting of:
[0553] a) a polypeptide having about/at least 60, 61, 62, 63, 64, 65, 66, 67, 68, 69, 70, 71, 72, 73, 74, 75, 76, 77, 78, 79, 80, 81, 82, 83, 84, 85, 86, 87, 88, 89, 90, 91, 92, 93, 94, 95, 96, 97, 98, 99 or 100% sequence identity to SEQ ID NO: 99;
[0554] b) a polypeptide having about/at least 60, 61, 62, 63, 64, 65, 66, 67, 68, 69, 70, 71, 72, 73, 74, 75, 76, 77, 78, 79, 80, 81, 82, 83, 84, 85, 86, 87, 88, 89, 90, 91, 92, 93, 94, 95, 96, 97, 98, 99 or 100% sequence identity to a mature polypeptide of SEQ ID NO: 99;
[0555] c) a polypeptide encoded by a polynucleotide having about/at least 60, 61, 62, 63, 64, 65, 66, 67, 68, 69, 70, 71, 72, 73, 74, 75, 76, 77, 78, 79, 80, 81, 82, 83, 84, 85, 86, 87, 88, 89, 90, 91, 92, 93, 94, 95, 96, 97, 98, 99 or 100% sequence identity to SEQ ID NO: 152 or the cDNA sequence thereof;
[0556] d) a polypeptide derived from SEQ ID NO: 99 by substitution, deletion or insertion of one or more amino acids;
[0557] e) a polypeptide derived from a mature polypeptide of SEQ ID NO: 99 by substitution, deletion or insertion of one or more amino acids;
[0558] f) a polypeptide derived from the polypeptide of any one of a) through e) wherein the N- and/or C-terminal end has been extended by the addition of one or more amino acids; and
[0559] g) a fragment of the polypeptide of any one of a) through f)
   wherein the polypeptide has lytic cellulose monooxygenase activity.

[0560] In some embodiments, the protein is selected from the group consisting of:
[0561] a) a polypeptide having about/at least 60, 61, 62, 63, 64, 65, 66, 67, 68, 69, 70, 71, 72, 73, 74, 75, 76, 77, 78, 79, 80, 81, 82, 83, 84, 85, 86, 87, 88, 89, 90, 91, 92, 93, 94, 95, 96, 97, 98, 99 or 100% sequence identity to SEQ ID NO: 100;
[0562] b) a polypeptide having about/at least 60, 61, 62, 63, 64, 65, 66, 67, 68, 69, 70, 71, 72, 73, 74, 75, 76, 77, 78, 79, 80, 81, 82, 83, 84, 85, 86, 87, 88, 89, 90, 91, 92, 93, 94, 95, 96, 97, 98, 99 or 100% sequence identity to a mature polypeptide of SEQ ID NO: 100;
[0563] c) a polypeptide encoded by a polynucleotide having about/at least 60, 61, 62, 63, 64, 65, 66, 67, 68, 69, 70, 71, 72, 73, 74, 75, 76, 77, 78, 79, 80, 81, 82, 83, 84, 85, 86, 87, 88, 89, 90, 91, 92, 93, 94, 95, 96, 97, 98, 99 or 100% sequence identity to SEQ ID NO: 153 or the cDNA sequence thereof;
[0564] d) a polypeptide derived from SEQ ID NO: 100 by substitution, deletion or insertion of one or more amino acids;
[0565] e) a polypeptide derived from a mature polypeptide of SEQ ID NO: 100 by substitution, deletion or insertion of one or more amino acids;
[0566] f) a polypeptide derived from the polypeptide of any one of a) through e) wherein the N- and/or C-terminal end has been extended by the addition of one or more amino acids; and
[0567] g) a fragment of the polypeptide of any one of a) through f)
   wherein the polypeptide has triacylglycerol lipase activity.

[0568] In some embodiments, the protein is selected from the group consisting of:
[0569] a) a polypeptide having about/at least 60, 61, 62, 63, 64, 65, 66, 67, 68, 69, 70, 71, 72, 73, 74, 75, 76, 77, 78, 79, 80, 81, 82, 83, 84, 85, 86, 87, 88, 89, 90, 91, 92, 93, 94, 95, 96, 97, 98, 99 or 100% sequence identity to SEQ ID NO: 101;
[0570] b) a polypeptide having about/at least 60, 61, 62, 63, 64, 65, 66, 67, 68, 69, 70, 71, 72, 73, 74, 75, 76, 77, 78, 79, 80, 81, 82, 83, 84, 85, 86, 87, 88, 89, 90, 91, 92, 93, 94, 95, 96, 97, 98, 99 or 100% sequence identity to a mature polypeptide of SEQ ID NO: 101;
[0571] c) a polypeptide encoded by a polynucleotide having about/at least 60, 61, 62, 63, 64, 65, 66, 67, 68, 69, 70, 71, 72, 73, 74, 75, 76, 77, 78, 79, 80, 81, 82, 83, 84, 85, 86, 87, 88, 89, 90, 91, 92, 93, 94, 95, 96, 97, 98, 99 or 100% sequence identity to SEQ ID NO: 154 or the cDNA sequence thereof;
[0572] d) a polypeptide derived from SEQ ID NO: 101 by substitution, deletion or insertion of one or more amino acids;
[0573] e) a polypeptide derived from a mature polypeptide of SEQ ID NO: 101 by substitution, deletion or insertion of one or more amino acids;
[0574] f) a polypeptide derived from the polypeptide of any one of a) through e) wherein the N- and/or C-terminal end has been extended by the addition of one or more amino acids; and
[0575] g) a fragment of the polypeptide of any one of a) through f)
   wherein the polypeptide has triacylglycerol lipase activity.

[0576] In some embodiments, the protein is selected from the group consisting of:
[0577] a) a polypeptide having about/at least 60, 61, 62, 63, 64, 65, 66, 67, 68, 69, 70, 71, 72, 73, 74, 75, 76, 77, 78, 79, 80, 81, 82, 83, 84, 85, 86, 87, 88, 89, 90, 91, 92, 93, 94, 95, 96, 97, 98, 99 or 100% sequence identity to SEQ ID NO: 102;
[0578] b) a polypeptide having about/at least 60, 61, 62, 63, 64, 65, 66, 67, 68, 69, 70, 71, 72, 73, 74, 75, 76, 77, 78, 79, 80, 81, 82, 83, 84, 85, 86, 87, 88, 89, 90, 91, 92, 93, 94, 95, 96, 97, 98, 99 or 100% sequence identity to a mature polypeptide of SEQ ID NO: 102;
[0579] c) a polypeptide encoded by a polynucleotide having about/at least 60, 61, 62, 63, 64, 65, 66, 67, 68, 69, 70, 71, 72, 73, 74, 75, 76, 77, 78, 79, 80, 81, 82, 83, 84, 85, 86, 87, 88, 89, 90, 91, 92, 93, 94, 95, 96, 97, 98, 99 or 100% sequence identity to SEQ ID NO: 155 or the cDNA sequence thereof;
[0580] d) a polypeptide derived from SEQ ID NO: 102 by substitution, deletion or insertion of one or more amino acids;
[0581] e) a polypeptide derived from a mature polypeptide of SEQ ID NO: 102 by substitution, deletion or insertion of one or more amino acids;
[0582] f) a polypeptide derived from the polypeptide of any one of a) through e) wherein the N- and/or C-terminal end has been extended by the addition of one or more amino acids; and
[0583] g) a fragment of the polypeptide of any one of a) through f)
   wherein the polypeptide has triacylglycerol lipase activity.

[0584] In some embodiments, the protein is selected from the group consisting of:
[0585] a) a polypeptide having about/at least 60, 61, 62, 63, 64, 65, 66, 67, 68, 69, 70, 71, 72, 73, 74, 75, 76, 77, 78, 79, 80, 81, 82, 83, 84, 85, 86, 87, 88, 89, 90, 91, 92, 93, 94, 95, 96, 97, 98, 99 or 100% sequence identity to SEQ ID NO: 103;
[0586] b) a polypeptide having about/at least 60, 61, 62, 63, 64, 65, 66, 67, 68, 69, 70, 71, 72, 73, 74, 75, 76, 77, 78, 79, 80, 81, 82, 83, 84, 85, 86, 87, 88, 89, 90, 91, 92, 93, 94, 95, 96, 97, 98, 99 or 100% sequence identity to a mature polypeptide of SEQ ID NO: 103;
[0587] c) a polypeptide encoded by a polynucleotide having about/at least 60, 61, 62, 63, 64, 65, 66, 67, 68, 69, 70, 71, 72, 73, 74, 75, 76, 77, 78, 79, 80, 81, 82, 83, 84, 85, 86, 87, 88, 89, 90, 91, 92, 93, 94, 95, 96, 97, 98, 99 or 100% sequence identity to SEQ ID NO: 156 or the cDNA sequence thereof;
[0588] d) a polypeptide derived from SEQ ID NO: 103 by substitution, deletion or insertion of one or more amino acids;
[0589] e) a polypeptide derived from a mature polypeptide of SEQ ID NO: 6 by substitution, deletion or insertion of one or more amino acids;
[0590] f) a polypeptide derived from the polypeptide of any one of a) through e) wherein the N- and/or C-terminal end has been extended by the addition of one or more amino acids; and
[0591] g) a fragment of the polypeptide of any one of a) through f)
   wherein the polypeptide has triacylglycerol lipase activity.

[0592] In some embodiments, the protein is selected from the group consisting of:
[0593] a) a polypeptide having about/at least 60, 61, 62, 63, 64, 65, 66, 67, 68, 69, 70, 71, 72, 73, 74, 75, 76, 77, 78, 79, 80, 81, 82, 83, 84, 85, 86, 87, 88, 89, 90, 91, 92, 93, 94, 95, 96, 97, 98, 99 or 100% sequence identity to SEQ ID NO: 104;
[0594] b) a polypeptide having about/at least 60, 61, 62, 63, 64, 65, 66, 67, 68, 69, 70, 71, 72, 73, 74, 75, 76, 77, 78, 79, 80, 81, 82, 83, 84, 85, 86, 87, 88, 89, 90, 91, 92, 93, 94, 95, 96, 97, 98, 99 or 100% sequence identity to a mature polypeptide of SEQ ID NO: 104;
[0595] c) a polypeptide encoded by a polynucleotide having about/at least 60, 61, 62, 63, 64, 65, 66, 67, 68, 69, 70, 71, 72, 73, 74, 75, 76, 77, 78, 79, 80, 81, 82, 83, 84, 85, 86, 87, 88, 89, 90, 91, 92, 93, 94, 95, 96, 97, 98, 99 or 100% sequence identity to SEQ ID NO: 157 or the cDNA sequence thereof;
[0596] d) a polypeptide derived from SEQ ID NO: 104 by substitution, deletion or insertion of one or more amino acids;
[0597] e) a polypeptide derived from a mature polypeptide of SEQ ID NO: 104 by substitution, deletion or insertion of one or more amino acids;
[0598] f) a polypeptide derived from the polypeptide of any one of a) through e) wherein the N- and/or C-terminal end has been extended by the addition of one or more amino acids; and
[0599] g) a fragment of the polypeptide of any one of a) through f)
   wherein the polypeptide has lysophospholipase activity.

[0600] In some embodiments, the protein is selected from the group consisting of:
[0601] a) a polypeptide having about/at least 60, 61, 62, 63, 64, 65, 66, 67, 68, 69, 70, 71, 72, 73, 74, 75, 76, 77, 78, 79, 80, 81, 82, 83, 84, 85, 86, 87, 88, 89, 90, 91, 92, 93, 94, 95, 96, 97, 98, 99 or 100% sequence identity to SEQ ID NO: 105;
[0602] b) a polypeptide having about/at least 60, 61, 62, 63, 64, 65, 66, 67, 68, 69, 70, 71, 72, 73, 74, 75, 76, 77, 78, 79, 80, 81, 82, 83, 84, 85, 86, 87, 88, 89, 90, 91, 92, 93, 94, 95, 96, 97, 98, 99 or 100% sequence identity to a mature polypeptide of SEQ ID NO: 105;
[0603] c) a polypeptide encoded by a polynucleotide having about/at least 60, 61, 62, 63, 64, 65, 66, 67, 68, 69, 70, 71, 72, 73, 74, 75, 76, 77, 78, 79, 80, 81, 82, 83, 84, 85, 86, 87, 88, 89, 90, 91, 92, 93, 94, 95, 96, 97, 98, 99 or 100% sequence identity to SEQ ID NO: 158 or the cDNA sequence thereof;
[0604] d) a polypeptide derived from SEQ ID NO: 105 by substitution, deletion or insertion of one or more amino acids;
[0605] e) a polypeptide derived from a mature polypeptide of SEQ ID NO: 105 by substitution, deletion or insertion of one or more amino acids;
[0606] f) a polypeptide derived from the polypeptide of any one of a) through e) wherein the N- and/or C-terminal end has been extended by the addition of one or more amino acids; and
[0607] g) a fragment of the polypeptide of any one of a) through f)
   wherein the polypeptide has pectinesterase activity.

[0608] In some embodiments, the protein is selected from the group consisting of:
[0609] a) a polypeptide having about/at least 60, 61, 62, 63, 64, 65, 66, 67, 68, 69, 70, 71, 72, 73, 74, 75, 76, 77, 78, 79, 80, 81, 82, 83, 84, 85, 86, 87, 88, 89, 90, 91, 92, 93, 94, 95, 96, 97, 98, 99 or 100% sequence identity to SEQ ID NO: 106;
[0610] b) a polypeptide having about/at least 60, 61, 62, 63, 64, 65, 66, 67, 68, 69, 70, 71, 72, 73, 74, 75, 76, 77, 78, 79, 80, 81, 82, 83, 84, 85, 86, 87, 88, 89, 90, 91, 92, 93, 94, 95, 96, 97, 98, 99 or 100% sequence identity to a mature polypeptide of SEQ ID NO: 106;
[0611] c) a polypeptide encoded by a polynucleotide having about/at least 60, 61, 62, 63, 64, 65, 66, 67, 68, 69, 70, 71, 72, 73, 74, 75, 76, 77, 78, 79, 80, 81, 82, 83, 84, 85, 86, 87, 88, 89, 90, 91, 92, 93, 94, 95, 96, 97, 98, 99 or 100% sequence identity to SEQ ID NO: 159 or the cDNA sequence thereof;
[0612] d) a polypeptide derived from SEQ ID NO: 106 by substitution, deletion or insertion of one or more amino acids;
[0613] e) a polypeptide derived from a mature polypeptide of SEQ ID NO: 106 by substitution, deletion or insertion of one or more amino acids;
[0614] f) a polypeptide derived from the polypeptide of any one of a) through e) wherein the N- and/or C-terminal end has been extended by the addition of one or more amino acids; and
[0615] g) a fragment of the polypeptide of any one of a) through f)
   wherein the polypeptide has phospholipase activity.

[0616] In some embodiments, the protein is selected from the group consisting of:
[0617] a) a polypeptide having about/at least 60, 61, 62, 63, 64, 65, 66, 67, 68, 69, 70, 71, 72, 73, 74, 75, 76, 77, 78, 79, 80, 81, 82, 83, 84, 85, 86, 87, 88, 89, 90, 91, 92, 93, 94, 95, 96, 97, 98, 99 or 100% sequence identity to SEQ ID NO: 107;
[0618] b) a polypeptide having about/at least 60, 61, 62, 63, 64, 65, 66, 67, 68, 69, 70, 71, 72, 73, 74, 75, 76, 77, 78, 79, 80, 81, 82, 83, 84, 85, 86, 87, 88, 89, 90, 91, 92, 93, 94, 95, 96, 97, 98, 99 or 100% sequence identity to a mature polypeptide of SEQ ID NO: 107;
[0619] c) a polypeptide encoded by a polynucleotide having about/at least 60, 61, 62, 63, 64, 65, 66, 67, 68, 69, 70, 71, 72, 73, 74, 75, 76, 77, 78, 79, 80, 81, 82, 83, 84, 85, 86, 87, 88, 89, 90, 91, 92, 93, 94, 95, 96, 97, 98, 99 or 100% sequence identity to SEQ ID NO: 160 or the cDNA sequence thereof;
[0620] d) a polypeptide derived from SEQ ID NO: 107 by substitution, deletion or insertion of one or more amino acids;
[0621] e) a polypeptide derived from a mature polypeptide of SEQ ID NO: 107 by substitution, deletion or insertion of one or more amino acids;
[0622] f) a polypeptide derived from the polypeptide of any one of a) through e) wherein the N- and/or C-terminal end has been extended by the addition of one or more amino acids; and
[0623] g) a fragment of the polypeptide of any one of a) through f)
   wherein the polypeptide has phospholipase C activity.

[0624] In some embodiments, the protein is selected from the group consisting of:
[0625] a) a polypeptide having about/at least 60, 61, 62, 63, 64, 65, 66, 67, 68, 69, 70, 71, 72, 73, 74, 75, 76, 77, 78, 79, 80, 81, 82, 83, 84, 85, 86, 87, 88, 89, 90, 91, 92, 93, 94, 95, 96, 97, 98, 99 or 100% sequence identity to SEQ ID NO: 108;
[0626] b) a polypeptide having about/at least 60, 61, 62, 63, 64, 65, 66, 67, 68, 69, 70, 71, 72, 73, 74, 75, 76, 77, 78, 79, 80, 81, 82, 83, 84, 85, 86, 87, 88, 89, 90, 91, 92, 93, 94, 95, 96, 97, 98, 99 or 100% sequence identity to a mature polypeptide of SEQ ID NO: 108;
[0627] c) a polypeptide encoded by a polynucleotide having about/at least 60, 61, 62, 63, 64, 65, 66, 67, 68, 69, 70, 71, 72, 73, 74, 75, 76, 77, 78, 79, 80, 81, 82, 83, 84, 85, 86, 87, 88, 89, 90, 91, 92, 93, 94, 95, 96, 97, 98, 99 or 100% sequence identity to SEQ ID NO: 59 or the cDNA sequence thereof;
[0628] d) a polypeptide encoded by a polynucleotide having about/at least 60, 61, 62, 63, 64, 65, 66, 67, 68, 69, 70, 71, 72, 73, 74, 75, 76, 77, 78, 79, 80, 81, 82, 83, 84, 85, 86, 87, 88, 89, 90, 91, 92, 93, 94, 95, 96, 97, 98, 99 or 100% sequence identity to SEQ ID NO: 161 or the cDNA sequence thereof;
[0629] e) a polypeptide derived from SEQ ID NO: 108 by substitution, deletion or insertion of one or more amino acids;
[0630] f) a polypeptide derived from a mature polypeptide of SEQ ID NO: 108 by substitution, deletion or insertion of one or more amino acids;
[0631] g) a polypeptide derived from the polypeptide of any one of a) through f) wherein the N- and/or C-terminal end has been extended by the addition of one or more amino acids; and
[0632] h) a fragment of the polypeptide of any one of a) through g)
   wherein the polypeptide has phoshoinositide phospholipase C activity.

[0633] In some embodiments, the protein is selected from the group consisting of:
[0634] a) a polypeptide having about/at least 60, 61, 62, 63, 64, 65, 66, 67, 68, 69, 70, 71, 72, 73, 74, 75, 76, 77, 78, 79, 80, 81, 82, 83, 84, 85, 86, 87, 88, 89, 90, 91, 92, 93, 94, 95, 96, 97, 98, 99 or 100% sequence identity to SEQ ID NO: 109;
[0635] b) a polypeptide having about/at least 60, 61, 62, 63, 64, 65, 66, 67, 68, 69, 70, 71, 72, 73, 74, 75, 76, 77, 78, 79, 80, 81, 82, 83, 84, 85, 86, 87, 88, 89, 90, 91, 92, 93, 94, 95, 96, 97, 98, 99 or 100% sequence identity to a mature polypeptide of SEQ ID NO: 109;
[0636] c) a polypeptide encoded by a polynucleotide having about/at least 60, 61, 62, 63, 64, 65, 66, 67, 68, 69, 70, 71, 72, 73, 74, 75, 76, 77, 78, 79, 80, 81, 82, 83, 84, 85, 86, 87, 88, 89, 90, 91, 92, 93, 94, 95, 96, 97, 98, 99 or 100% sequence identity to SEQ ID NO: 162 or the cDNA sequence thereof;
[0637] d) a polypeptide derived from SEQ ID NO: 109 by substitution, deletion or insertion of one or more amino acids;
[0638] e) a polypeptide derived from a mature polypeptide of SEQ ID NO: 109 by substitution, deletion or insertion of one or more amino acids;
[0639] f) a polypeptide derived from the polypeptide of any one of a) through e) wherein the N- and/or C-terminal end has been extended by the addition of one or more amino acids; and
[0640] g) a fragment of the polypeptide of any one of a) through f)
   wherein the polypeptide has alpha-amylase activity.

[0641] In some embodiments, the protein is selected from the group consisting of:
[0642] a) a polypeptide having about/at least 60, 61, 62, 63, 64, 65, 66, 67, 68, 69, 70, 71, 72, 73, 74, 75, 76, 77, 78, 79, 80, 81, 82, 83, 84, 85, 86, 87, 88, 89, 90, 91, 92, 93, 94, 95, 96, 97, 98, 99 or 100% sequence identity to SEQ ID NO: 110;
[0643] b) a polypeptide having about/at least 60, 61, 62, 63, 64, 65, 66, 67, 68, 69, 70, 71, 72, 73, 74, 75, 76, 77, 78, 79, 80, 81, 82, 83, 84, 85, 86, 87, 88, 89, 90, 91, 92, 93, 94, 95, 96, 97, 98, 99 or 100% sequence identity to a mature polypeptide of SEQ ID NO: 110;
[0644] c) a polypeptide encoded by a polynucleotide having about/at least 60, 61, 62, 63, 64, 65, 66, 67, 68, 69, 70, 71, 72, 73, 74, 75, 76, 77, 78, 79, 80, 81, 82, 83, 84, 85, 86, 87, 88, 89, 90, 91, 92, 93, 94, 95, 96, 97, 98, 99 or 100% sequence identity to SEQ ID NO: 163 or the cDNA sequence thereof;
[0645] d) a polypeptide derived from SEQ ID NO: 110 by substitution, deletion or insertion of one or more amino acids;
[0646] e) a polypeptide derived from a mature polypeptide of SEQ ID NO: 110 by substitution, deletion or insertion of one or more amino acids;
[0647] f) a polypeptide derived from the polypeptide of any one of a) through e) wherein the N- and/or C-terminal end has been extended by the addition of one or more amino acids; and
[0648] g) a fragment of the polypeptide of any one of a) through f)
   wherein the polypeptide has alpha-amylase activity.

[0649] In some embodiments, the protein is selected from the group consisting of:
[0650] a) a polypeptide having about/at least 60, 61, 62, 63, 64, 65, 66, 67, 68, 69, 70, 71, 72, 73, 74, 75, 76, 77, 78, 79, 80, 81, 82, 83, 84, 85, 86, 87, 88, 89, 90, 91, 92, 93, 94, 95, 96, 97, 98, 99 or 100% sequence identity to SEQ ID NO: 111;
[0651] b) a polypeptide having about/at least 60, 61, 62, 63, 64, 65, 66, 67, 68, 69, 70, 71, 72, 73, 74, 75, 76, 77, 78, 79, 80, 81, 82, 83, 84, 85, 86, 87, 88, 89, 90, 91, 92, 93, 94, 95, 96, 97, 98, 99 or 100% sequence identity to a mature polypeptide of SEQ ID NO: 111;
[0652] c) a polypeptide encoded by a polynucleotide having about/at least 60, 61, 62, 63, 64, 65, 66, 67, 68, 69, 70, 71, 72, 73, 74, 75, 76, 77, 78, 79, 80, 81, 82, 83, 84, 85, 86, 87, 88, 89, 90, 91, 92, 93, 94, 95, 96, 97, 98, 99 or 100% sequence identity to SEQ ID NO: 164 or the cDNA sequence thereof;
[0653] d) a polypeptide derived from SEQ ID NO: 111 by substitution, deletion or insertion of one or more amino acids;
[0654] e) a polypeptide derived from a mature polypeptide of SEQ ID NO: 111 by substitution, deletion or insertion of one or more amino acids;
[0655] f) a polypeptide derived from the polypeptide of any one of a) through e) wherein the N- and/or C-terminal end has been extended by the addition of one or more amino acids; and
[0656] g) a fragment of the polypeptide of any one of a) through f)
   wherein the polypeptide has alpha-amylase activity.

[0657] In some embodiments, the protein is selected from the group consisting of:
[0658] a) a polypeptide having about/at least 60, 61, 62, 63, 64, 65, 66, 67, 68, 69, 70, 71, 72, 73, 74, 75, 76, 77, 78, 79, 80, 81, 82, 83, 84, 85, 86, 87, 88, 89, 90, 91, 92, 93, 94, 95, 96, 97, 98, 99 or 100% sequence identity to SEQ ID NO: 112;
[0659] b) a polypeptide having about/at least 60, 61, 62, 63, 64, 65, 66, 67, 68, 69, 70, 71, 72, 73, 74, 75, 76, 77, 78, 79, 80, 81, 82, 83, 84, 85, 86, 87, 88, 89, 90, 91, 92, 93, 94, 95, 96, 97, 98, 99 or 100% sequence identity to a mature polypeptide of SEQ ID NO: 112;
[0660] c) a polypeptide encoded by a polynucleotide having about/at least 60, 61, 62, 63, 64, 65, 66, 67, 68, 69, 70, 71, 72, 73, 74, 75, 76, 77, 78, 79, 80, 81, 82, 83, 84, 85, 86, 87, 88, 89, 90, 91, 92, 93, 94, 95, 96, 97, 98, 99 or 100% sequence identity to SEQ ID NO: 165 or the cDNA sequence thereof;
[0661] d) a polypeptide derived from SEQ ID NO: 112 by substitution, deletion or insertion of one or more amino acids;
[0662] e) a polypeptide derived from a mature polypeptide of SEQ ID NO: 12 by substitution, deletion or insertion of one or more amino acids;
[0663] f) a polypeptide derived from the polypeptide of any one of a) through e) wherein the N- and/or C-terminal end has been extended by the addition of one or more amino acids; and
[0664] g) a fragment of the polypeptide of any one of a) through f)
   wherein the polypeptide has alpha-amylase activity.

[0665] In some embodiments, the protein is selected from the group consisting of:
[0666] a) a polypeptide having about/at least 60, 61, 62, 63, 64, 65, 66, 67, 68, 69, 70, 71, 72, 73, 74, 75, 76, 77, 78, 79, 80, 81, 82, 83, 84, 85, 86, 87, 88, 89, 90, 91, 92, 93, 94, 95, 96, 97, 98, 99 or 100% sequence identity to SEQ ID NO: 113;
[0667] b) a polypeptide having about/at least 60, 61, 62, 63, 64, 65, 66, 67, 68, 69, 70, 71, 72, 73, 74, 75, 76, 77, 78, 79, 80, 81, 82, 83, 84, 85, 86, 87, 88, 89, 90, 91, 92, 93, 94, 95, 96, 97, 98, 99 or 100% sequence identity to a mature polypeptide of SEQ ID NO: 113;
[0668] c) a polypeptide encoded by a polynucleotide having about/at least 60, 61, 62, 63, 64, 65, 66, 67, 68, 69, 70, 71, 72, 73, 74, 75, 76, 77, 78, 79, 80, 81, 82, 83, 84, 85, 86, 87, 88, 89, 90, 91, 92, 93, 94, 95, 96, 97, 98, 99 or 100% sequence identity to SEQ ID NO: 166 or the cDNA sequence thereof;
[0669] d) a polypeptide derived from SEQ ID NO: 113 by substitution, deletion or insertion of one or more amino acids;
[0670] e) a polypeptide derived from a mature polypeptide of SEQ ID NO: 113 by substitution, deletion or insertion of one or more amino acids;
[0671] f) a polypeptide derived from the polypeptide of any one of a) through e) wherein the N- and/or C-terminal end has been extended by the addition of one or more amino acids; and
[0672] g) a fragment of the polypeptide of any one of a) through f)
   wherein the polypeptide has alpha-amylase activity.

[0673] In some embodiments, the protein is selected from the group consisting of:
[0674] a) a polypeptide having about/at least 60, 61, 62, 63, 64, 65, 66, 67, 68, 69, 70, 71, 72, 73, 74, 75, 76, 77, 78, 79, 80, 81, 82, 83, 84, 85, 86, 87, 88, 89, 90, 91, 92, 93, 94, 95, 96, 97, 98, 99 or 100% sequence identity to SEQ ID NO: 114;
[0675] b) a polypeptide having about/at least 60, 61, 62, 63, 64, 65, 66, 67, 68, 69, 70, 71, 72, 73, 74, 75, 76, 77, 78, 79, 80, 81, 82, 83, 84, 85, 86, 87, 88, 89, 90, 91, 92, 93, 94, 95, 96, 97, 98, 99 or 100% sequence identity to a mature polypeptide of SEQ ID NO: 114;
[0676] c) a polypeptide encoded by a polynucleotide having about/at least 60, 61, 62, 63, 64, 65, 66, 67, 68, 69, 70, 71, 72, 73, 74, 75, 76, 77, 78, 79, 80, 81, 82, 83, 84, 85, 86, 87, 88, 89, 90, 91, 92, 93, 94, 95, 96, 97, 98, 99 or 100% sequence identity to SEQ ID NO: 167 or the cDNA sequence thereof;
[0677] d) a polypeptide derived from SEQ ID NO: 114 by substitution, deletion or insertion of one or more amino acids;
[0678] e) a polypeptide derived from a mature polypeptide of SEQ ID NO: 114 by substitution, deletion or insertion of one or more amino acids;
[0679] f) a polypeptide derived from the polypeptide of any one of a) through e) wherein the N- and/or C-terminal end has been extended by the addition of one or more amino acids; and
[0680] g) a fragment of the polypeptide of any one of a) through f)
   wherein the polypeptide has cellulase activity.

[0681] In some embodiments, the protein is selected from the group consisting of:
[0682] a) a polypeptide having about/at least 60, 61, 62, 63, 64, 65, 66, 67, 68, 69, 70, 71, 72, 73, 74, 75, 76, 77, 78, 79, 80, 81, 82, 83, 84, 85, 86, 87, 88, 89, 90, 91, 92, 93, 94, 95, 96, 97, 98, 99 or 100% sequence identity to SEQ ID NO: 115;
[0683] b) a polypeptide having about/at least 60, 61, 62, 63, 64, 65, 66, 67, 68, 69, 70, 71, 72, 73, 74, 75, 76, 77, 78, 79, 80, 81, 82, 83, 84, 85, 86, 87, 88, 89, 90, 91, 92, 93, 94, 95, 96, 97, 98, 99 or 100% sequence identity to a mature polypeptide of SEQ ID NO: 115;
[0684] c) a polypeptide encoded by a polynucleotide having about/at least 60, 61, 62, 63, 64, 65, 66, 67, 68, 69, 70, 71, 72, 73, 74, 75, 76, 77, 78, 79, 80, 81, 82, 83, 84, 85, 86, 87, 88, 89, 90, 91, 92, 93, 94, 95, 96, 97, 98, 99 or 100% sequence identity to SEQ ID NO: 168 or the cDNA sequence thereof;
[0685] d) a polypeptide derived from SEQ ID NO: 115 by substitution, deletion or insertion of one or more amino acids;
[0686] e) a polypeptide derived from a mature polypeptide of SEQ ID NO: 115 by substitution, deletion or insertion of one or more amino acids;
[0687] f) a polypeptide derived from the polypeptide of any one of a) through e) wherein the N- and/or C-terminal end has been extended by the addition of one or more amino acids; and
[0688] g) a fragment of the polypeptide of any one of a) through f)
   wherein the polypeptide has cellulase activity.

[0689] In some embodiments, the protein is selected from the group consisting of:
[0690] a) a polypeptide having about/at least 60, 61, 62, 63, 64, 65, 66, 67, 68, 69, 70, 71, 72, 73, 74, 75, 76, 77, 78, 79, 80, 81, 82, 83, 84, 85, 86, 87, 88, 89, 90, 91, 92, 93, 94, 95, 96, 97, 98, 99 or 100% sequence identity to SEQ ID NO: 116;
[0691] b) a polypeptide having about/at least 60, 61, 62, 63, 64, 65, 66, 67, 68, 69, 70, 71, 72, 73, 74, 75, 76, 77, 78, 79, 80, 81, 82, 83, 84, 85, 86, 87, 88, 89, 90, 91, 92, 93, 94, 95, 96, 97, 98, 99 or 100% sequence identity to a mature polypeptide of SEQ ID NO: 116;
[0692] c) a polypeptide encoded by a polynucleotide having about/at least 60, 61, 62, 63, 64, 65, 66, 67, 68, 69, 70, 71, 72, 73, 74, 75, 76, 77, 78, 79, 80, 81, 82, 83, 84, 85, 86, 87, 88, 89, 90, 91, 92, 93, 94, 95, 96, 97, 98, 99 or 100% sequence identity to SEQ ID NO: 169 or the cDNA sequence thereof;
[0693] d) a polypeptide derived from SEQ ID NO: 116 by substitution, deletion or insertion of one or more amino acids;
[0694] e) a polypeptide derived from a mature polypeptide of SEQ ID NO: 116 by substitution, deletion or insertion of one or more amino acids;
[0695] f) a polypeptide derived from the polypeptide of any one of a) through e) wherein the N- and/or C-terminal end has been extended by the addition of one or more amino acids; and
[0696] g) a fragment of the polypeptide of any one of a) through f)
   wherein the polypeptide has cellulase activity.

[0697] In some embodiments, the protein is selected from the group consisting of:
[0698] a) a polypeptide having about/at least 60, 61, 62, 63, 64, 65, 66, 67, 68, 69, 70, 71, 72, 73, 74, 75, 76, 77, 78, 79, 80, 81, 82, 83, 84, 85, 86, 87, 88, 89, 90, 91, 92, 93, 94, 95, 96, 97, 98, 99 or 100% sequence identity to SEQ ID NO: 117;
[0699] b) a polypeptide having about/at least 60, 61, 62, 63, 64, 65, 66, 67, 68, 69, 70, 71, 72, 73, 74, 75, 76, 77, 78, 79, 80, 81, 82, 83, 84, 85, 86, 87, 88, 89, 90, 91, 92, 93, 94, 95, 96, 97, 98, 99 or 100% sequence identity to a mature polypeptide of SEQ ID NO: 117;
[0700] c) a polypeptide encoded by a polynucleotide having about/at least 60, 61, 62, 63, 64, 65, 66, 67, 68, 69, 70, 71, 72, 73, 74, 75, 76, 77, 78, 79, 80, 81, 82, 83, 84, 85, 86, 87, 88, 89, 90, 91, 92, 93, 94, 95, 96, 97, 98, 99 or 100% sequence identity to SEQ ID NO: 170 or the cDNA sequence thereof;
[0701] d) a polypeptide derived from SEQ ID NO: 117 by substitution, deletion or insertion of one or more amino acids;
[0702] e) a polypeptide derived from a mature polypeptide of SEQ ID NO: 117 by substitution, deletion or insertion of one or more amino acids;
[0703] f) a polypeptide derived from the polypeptide of any one of a) through e) wherein the N- and/or C-terminal end has been extended by the addition of one or more amino acids; and
[0704] g) a fragment of the polypeptide of any one of a) through f)
   wherein the polypeptide has inulinase activity.

[0705] In some embodiments, the protein is selected from the group consisting of:
[0706] a) a polypeptide having about/at least 60, 61, 62, 63, 64, 65, 66, 67, 68, 69, 70, 71, 72, 73, 74, 75, 76, 77, 78, 79, 80, 81, 82, 83, 84, 85, 86, 87, 88, 89, 90, 91, 92, 93, 94, 95, 96, 97, 98, 99 or 100% sequence identity to SEQ ID NO: 118;
[0707] b) a polypeptide having about/at least 60, 61, 62, 63, 64, 65, 66, 67, 68, 69, 70, 71, 72, 73, 74, 75, 76, 77, 78, 79, 80, 81, 82, 83, 84, 85, 86, 87, 88, 89, 90, 91, 92, 93, 94, 95, 96, 97, 98, 99 or 100% sequence identity to a mature polypeptide of SEQ ID NO: 118;
[0708] c) a polypeptide encoded by a polynucleotide having about/at least 60, 61, 62, 63, 64, 65, 66, 67, 68, 69, 70, 71, 72, 73, 74, 75, 76, 77, 78, 79, 80, 81, 82, 83, 84, 85, 86, 87, 88, 89, 90, 91, 92, 93, 94, 95, 96, 97, 98, 99 or 100% sequence identity to SEQ ID NO: 171 or the cDNA sequence thereof;
[0709] d) a polypeptide derived from SEQ ID NO: 118 by substitution, deletion or insertion of one or more amino acids;
[0710] e) a polypeptide derived from a mature polypeptide of SEQ ID NO: 118 by substitution, deletion or insertion of one or more amino acids;
[0711] f) a polypeptide derived from the polypeptide of any one of a) through e) wherein the N- and/or C-terminal end has been extended by the addition of one or more amino acids; and
[0712] g) a fragment of the polypeptide of any one of a) through f)
   wherein the polypeptide has endo-1,4-beta-xylanase activity.

[0713] In some embodiments, the protein is selected from the group consisting of:
[0714] a) a polypeptide having about/at least 60, 61, 62, 63, 64, 65, 66, 67, 68, 69, 70, 71, 72, 73, 74, 75, 76, 77, 78, 79, 80, 81, 82, 83, 84, 85, 86, 87, 88, 89, 90, 91, 92, 93, 94, 95, 96, 97, 98, 99 or 100% sequence identity to SEQ ID NO: 119;
[0715] b) a polypeptide having about/at least 60, 61, 62, 63, 64, 65, 66, 67, 68, 69, 70, 71, 72, 73, 74, 75, 76, 77, 78, 79, 80, 81, 82, 83, 84, 85, 86, 87, 88, 89, 90, 91, 92, 93, 94, 95, 96, 97, 98, 99 or 100% sequence identity to a mature polypeptide of SEQ ID NO: 119;
[0716] c) a polypeptide encoded by a polynucleotide having about/at least 60, 61, 62, 63, 64, 65, 66, 67, 68, 69, 70, 71, 72, 73, 74, 75, 76, 77, 78, 79, 80, 81, 82, 83, 84, 85, 86, 87, 88, 89, 90, 91, 92, 93, 94, 95, 96, 97, 98, 99 or 100% sequence identity to SEQ ID NO: 172 or the cDNA sequence thereof;
[0717] d) a polypeptide derived from SEQ ID NO: 119 by substitution, deletion or insertion of one or more amino acids;
[0718] e) a polypeptide derived from a mature polypeptide of SEQ ID NO: 119 by substitution, deletion or insertion of one or more amino acids;
[0719] f) a polypeptide derived from the polypeptide of any one of a) through e) wherein the N- and/or C-terminal end has been extended by the addition of one or more amino acids; and
[0720] g) a fragment of the polypeptide of any one of a) through f)
   wherein the polypeptide has endo-1,4-beta-xylanase activity.

[0721] In some embodiments, the protein is selected from the group consisting of:
[0722] a) a polypeptide having about/at least 60, 61, 62, 63, 64, 65, 66, 67, 68, 69, 70, 71, 72, 73, 74, 75, 76, 77, 78, 79, 80, 81, 82, 83, 84, 85, 86, 87, 88, 89, 90, 91, 92, 93, 94, 95, 96, 97, 98, 99 or 100% sequence identity to SEQ ID NO: 120;
[0723] b) a polypeptide having about/at least 60, 61, 62, 63, 64, 65, 66, 67, 68, 69, 70, 71, 72, 73, 74, 75, 76, 77, 78, 79, 80, 81, 82, 83, 84, 85, 86, 87, 88, 89, 90, 91, 92, 93, 94, 95, 96, 97, 98, 99 or 100% sequence identity to a mature polypeptide of SEQ ID NO: 120;
[0724] c) a polypeptide encoded by a polynucleotide having about/at least 60, 61, 62, 63, 64, 65, 66, 67, 68, 69, 70, 71, 72, 73, 74, 75, 76, 77, 78, 79, 80, 81, 82, 83, 84, 85, 86, 87, 88, 89, 90, 91, 92, 93, 94, 95, 96, 97, 98, 99 or 100% sequence identity to SEQ ID NO: 173 or the cDNA sequence thereof;
[0725] d) a polypeptide derived from SEQ ID NO: 120 by substitution, deletion or insertion of one or more amino acids;
[0726] e) a polypeptide derived from a mature polypeptide of SEQ ID NO: 120 by substitution, deletion or insertion of one or more amino acids;
[0727] f) a polypeptide derived from the polypeptide of any one of a) through e) wherein the N- and/or C-terminal end has been extended by the addition of one or more amino acids; and
[0728] g) a fragment of the polypeptide of any one of a) through f)
   wherein the polypeptide has endo-1,4-beta-xylanase activity.

[0729] In some embodiments, the protein is selected from the group consisting of:
[0730] a) a polypeptide having about/at least 60, 61, 62, 63, 64, 65, 66, 67, 68, 69, 70, 71, 72, 73, 74, 75, 76, 77, 78, 79, 80, 81, 82, 83, 84, 85, 86, 87, 88, 89, 90, 91, 92, 93, 94, 95, 96, 97, 98, 99 or 100% sequence identity to SEQ ID NO: 121;
[0731] b) a polypeptide having about/at least 60, 61, 62, 63, 64, 65, 66, 67, 68, 69, 70, 71, 72, 73, 74, 75, 76, 77, 78, 79, 80, 81, 82, 83, 84, 85, 86, 87, 88, 89, 90, 91, 92, 93, 94, 95, 96, 97, 98, 99 or 100% sequence identity to a mature polypeptide of SEQ ID NO: 121;
[0732] c) a polypeptide encoded by a polynucleotide having about/at least 60, 61, 62, 63, 64, 65, 66, 67, 68, 69, 70, 71, 72, 73, 74, 75, 76, 77, 78, 79, 80, 81, 82, 83, 84, 85, 86, 87, 88, 89, 90, 91, 92, 93, 94, 95, 96, 97, 98, 99 or 100% sequence identity to SEQ ID NO: 174 or the cDNA sequence thereof;
[0733] d) a polypeptide derived from SEQ ID NO: 121 by substitution, deletion or insertion of one or more amino acids;
[0734] e) a polypeptide derived from a mature polypeptide of SEQ ID NO: 121 by substitution, deletion or insertion of one or more amino acids;
[0735] f) a polypeptide derived from the polypeptide of any one of a) through e) wherein the N- and/or C-terminal end has been extended by the addition of one or more amino acids; and
[0736] g) a fragment of the polypeptide of any one of a) through f)
   wherein the polypeptide has chitinase activity.

[0737] In some embodiments, the protein is selected from the group consisting of:
[0738] a) a polypeptide having about/at least 60, 61, 62, 63, 64, 65, 66, 67, 68, 69, 70, 71, 72, 73, 74, 75, 76, 77, 78, 79, 80, 81, 82, 83, 84, 85, 86, 87, 88, 89, 90, 91, 92, 93, 94, 95, 96, 97, 98, 99 or 100% sequence identity to SEQ ID NO: 122;
[0739] b) a polypeptide having about/at least 60, 61, 62, 63, 64, 65, 66, 67, 68, 69, 70, 71, 72, 73, 74, 75, 76, 77, 78, 79, 80, 81, 82, 83, 84, 85, 86, 87, 88, 89, 90, 91, 92, 93, 94, 95, 96, 97, 98, 99 or 100% sequence identity to a mature polypeptide of SEQ ID NO: 122;
[0740] c) a polypeptide encoded by a polynucleotide having about/at least 60, 61, 62, 63, 64, 65, 66, 67, 68, 69, 70, 71, 72, 73, 74, 75, 76, 77, 78, 79, 80, 81, 82, 83, 84, 85, 86, 87, 88, 89, 90, 91, 92, 93, 94, 95, 96, 97, 98, 99 or 100% sequence identity to SEQ ID NO: 175 or the cDNA sequence thereof;
[0741] d) a polypeptide derived from SEQ ID NO: 122 by substitution, deletion or insertion of one or more amino acids;
[0742] e) a polypeptide derived from a mature polypeptide of SEQ ID NO: 122 by substitution, deletion or insertion of one or more amino acids;
[0743] f) a polypeptide derived from the polypeptide of any one of a) through e) wherein the N- and/or C-terminal end has been extended by the addition of one or more amino acids; and
[0744] g) a fragment of the polypeptide of any one of a) through f)
   wherein the polypeptide has chitinase activity.

[0745] In some embodiments, the protein is selected from the group consisting of:
[0746] a) a polypeptide having about/at least 60, 61, 62, 63, 64, 65, 66, 67, 68, 69, 70, 71, 72, 73, 74, 75, 76, 77, 78, 79, 80, 81, 82, 83, 84, 85, 86, 87, 88, 89, 90, 91, 92, 93, 94, 95, 96, 97, 98, 99 or 100% sequence identity to SEQ ID NO: 123;
[0747] b) a polypeptide having about/at least 60, 61, 62, 63, 64, 65, 66, 67, 68, 69, 70, 71, 72, 73, 74, 75, 76, 77, 78, 79, 80, 81, 82, 83, 84, 85, 86, 87, 88, 89, 90, 91, 92, 93, 94, 95, 96, 97, 98, 99 or 100% sequence identity to a mature polypeptide of SEQ ID NO: 123;
[0748] c) a polypeptide encoded by a polynucleotide having about/at least 60, 61, 62, 63, 64, 65, 66, 67, 68, 69, 70, 71, 72, 73, 74, 75, 76, 77, 78, 79, 80, 81, 82, 83, 84, 85, 86, 87, 88, 89, 90, 91, 92, 93, 94, 95, 96, 97, 98, 99 or 100% sequence identity to SEQ ID NO: 176 or the cDNA sequence thereof;
[0749] d) a polypeptide derived from SEQ ID NO: 123 by substitution, deletion or insertion of one or more amino acids;
[0750] e) a polypeptide derived from a mature polypeptide of SEQ ID NO: 123 by substitution, deletion or insertion of one or more amino acids;
[0751] f) a polypeptide derived from the polypeptide of any one of a) through e) wherein the N- and/or C-terminal end has been extended by the addition of one or more amino acids; and
[0752] g) a fragment of the polypeptide of any one of a) through f)
   wherein the polypeptide has chitinase activity.

[0753] In some embodiments, the protein is selected from the group consisting of:
[0754] a) a polypeptide having about/at least 60, 61, 62, 63, 64, 65, 66, 67, 68, 69, 70, 71, 72, 73, 74, 75, 76, 77, 78, 79, 80, 81, 82, 83, 84, 85, 86, 87, 88, 89, 90, 91, 92, 93, 94, 95, 96, 97, 98, 99 or 100% sequence identity to SEQ ID NO: 124;
[0755] b) a polypeptide having about/at least 60, 61, 62, 63, 64, 65, 66, 67, 68, 69, 70, 71, 72, 73, 74, 75, 76, 77, 78, 79, 80, 81, 82, 83, 84, 85, 86, 87, 88, 89, 90, 91, 92, 93, 94, 95, 96, 97, 98, 99 or 100% sequence identity to a mature polypeptide of SEQ ID NO: 124;
[0756] c) a polypeptide encoded by a polynucleotide having about/at least 60, 61, 62, 63, 64, 65, 66, 67, 68, 69, 70, 71, 72, 73, 74, 75, 76, 77, 78, 79, 80, 81, 82, 83, 84, 85, 86, 87, 88, 89, 90, 91, 92, 93, 94, 95, 96, 97, 98, 99 or 100% sequence identity to SEQ ID NO: 177 or the cDNA sequence thereof;
[0757] d) a polypeptide derived from SEQ ID NO: 124 by substitution, deletion or insertion of one or more amino acids;
[0758] e) a polypeptide derived from a mature polypeptide of SEQ ID NO: 124 by substitution, deletion or insertion of one or more amino acids;
[0759] f) a polypeptide derived from the polypeptide of any one of a) through e) wherein the N- and/or C-terminal end has been extended by the addition of one or more amino acids; and
[0760] g) a fragment of the polypeptide of any one of a) through f)
   wherein the polypeptide has chitinase activity.

[0761] In some embodiments, the protein is selected from the group consisting of:
[0762] a) a polypeptide having about/at least 60, 61, 62, 63, 64, 65, 66, 67, 68, 69, 70, 71, 72, 73, 74, 75, 76, 77, 78, 79, 80, 81, 82, 83, 84, 85, 86, 87, 88, 89, 90, 91, 92, 93, 94, 95, 96, 97, 98, 99 or 100% sequence identity to SEQ ID NO: 125;
[0763] b) a polypeptide having about/at least 60, 61, 62, 63, 64, 65, 66, 67, 68, 69, 70, 71, 72, 73, 74, 75, 76, 77, 78, 79, 80, 81, 82, 83, 84, 85, 86, 87, 88, 89, 90, 91, 92, 93, 94, 95, 96, 97, 98, 99 or 100% sequence identity to a mature polypeptide of SEQ ID NO: 125;
[0764] c) a polypeptide encoded by a polynucleotide having about/at least 60, 61, 62, 63, 64, 65, 66, 67, 68, 69, 70, 71, 72, 73, 74, 75, 76, 77, 78, 79, 80, 81, 82, 83, 84, 85, 86, 87, 88, 89, 90, 91, 92, 93, 94, 95, 96, 97, 98, 99 or 100% sequence identity to SEQ ID NO: 178 or the cDNA sequence thereof;
[0765] d) a polypeptide derived from SEQ ID NO: 125 by substitution, deletion or insertion of one or more amino acids;
[0766] e) a polypeptide derived from a mature polypeptide of SEQ ID NO: 125 by substitution, deletion or insertion of one or more amino acids;
[0767] f) a polypeptide derived from the polypeptide of any one of a) through e) wherein the N- and/or C-terminal end has been extended by the addition of one or more amino acids; and
[0768] g) a fragment of the polypeptide of any one of a) through f)
   wherein the polypeptide has endo-polygalacturonase (pectinase) activity.

[0769] In some embodiments, the protein is selected from the group consisting of:
[0770] a) a polypeptide having about/at least 60, 61, 62, 63, 64, 65, 66, 67, 68, 69, 70, 71, 72, 73, 74, 75, 76, 77, 78, 79, 80, 81, 82, 83, 84, 85, 86, 87, 88, 89, 90, 91, 92, 93, 94, 95, 96, 97, 98, 99 or 100% sequence identity to SEQ ID NO: 126;
[0771] b) a polypeptide having about/at least 60, 61, 62, 63, 64, 65, 66, 67, 68, 69, 70, 71, 72, 73, 74, 75, 76, 77, 78, 79, 80, 81, 82, 83, 84, 85, 86, 87, 88, 89, 90, 91, 92, 93, 94, 95, 96, 97, 98, 99 or 100% sequence identity to a mature polypeptide of SEQ ID NO: 126;
[0772] c) a polypeptide encoded by a polynucleotide having about/at least 60, 61, 62, 63, 64, 65, 66, 67, 68, 69, 70, 71, 72, 73, 74, 75, 76, 77, 78, 79, 80, 81, 82, 83, 84, 85, 86, 87, 88, 89, 90, 91, 92, 93, 94, 95, 96, 97, 98, 99 or 100% sequence identity to SEQ ID NO: 179 or the cDNA sequence thereof;
[0773] d) a polypeptide derived from SEQ ID NO: 126 by substitution, deletion or insertion of one or more amino acids;
[0774] e) a polypeptide derived from a mature polypeptide of SEQ ID NO: 126 by substitution, deletion or insertion of one or more amino acids;
[0775] f) a polypeptide derived from the polypeptide of any one of a) through e) wherein the N- and/or C-terminal end has been extended by the addition of one or more amino acids; and
[0776] g) a fragment of the polypeptide of any one of a) through f)
   wherein the polypeptide has beta-glucosidase activity.

[0777] In some embodiments, the protein is selected from the group consisting of:
[0778] a) a polypeptide having about/at least 60, 61, 62, 63, 64, 65, 66, 67, 68, 69, 70, 71, 72, 73, 74, 75, 76, 77, 78, 79, 80, 81, 82, 83, 84, 85, 86, 87, 88, 89, 90, 91, 92, 93, 94, 95, 96, 97, 98, 99 or 100% sequence identity to SEQ ID NO: 127;
[0779] b) a polypeptide having about/at least 60, 61, 62, 63, 64, 65, 66, 67, 68, 69, 70, 71, 72, 73, 74, 75, 76, 77, 78, 79, 80, 81, 82, 83, 84, 85, 86, 87, 88, 89, 90, 91, 92, 93, 94, 95, 96, 97, 98, 99 or 100% sequence identity to a mature polypeptide of SEQ ID NO: 127;
[0780] c) a polypeptide encoded by a polynucleotide having about/at least 60, 61, 62, 63, 64, 65, 66, 67, 68, 69, 70, 71, 72, 73, 74, 75, 76, 77, 78, 79, 80, 81, 82, 83, 84, 85, 86, 87, 88, 89, 90, 91, 92, 93, 94, 95, 96, 97, 98, 99 or 100% sequence identity to SEQ ID NO: 180 or the cDNA sequence thereof;
[0781] d) a polypeptide derived from SEQ ID NO: 127 by substitution, deletion or insertion of one or more amino acids;
[0782] e) a polypeptide derived from a mature polypeptide of SEQ ID NO: 127 by substitution, deletion or insertion of one or more amino acids;
[0783] f) a polypeptide derived from the polypeptide of any one of a) through e) wherein the N- and/or C-terminal end has been extended by the addition of one or more amino acids; and
[0784] g) a fragment of the polypeptide of any one of a) through f)
   wherein the polypeptide has xylan 1,4-beta-xylosidase activity.

[0785] In some embodiments, the protein is selected from the group consisting of:
[0786] a) a polypeptide having about/at least 60, 61, 62, 63, 64, 65, 66, 67, 68, 69, 70, 71, 72, 73, 74, 75, 76, 77, 78, 79, 80, 81, 82, 83, 84, 85, 86, 87, 88, 89, 90, 91, 92, 93, 94, 95, 96, 97, 98, 99 or 100% sequence identity to SEQ ID NO: 128;
[0787] b) a polypeptide having about/at least 60, 61, 62, 63, 64, 65, 66, 67, 68, 69, 70, 71, 72, 73, 74, 75, 76, 77, 78, 79, 80, 81, 82, 83, 84, 85, 86, 87, 88, 89, 90, 91, 92, 93, 94, 95, 96, 97, 98, 99 or 100% sequence identity to a mature polypeptide of SEQ ID NO: 128;
[0788] c) a polypeptide encoded by a polynucleotide having about/at least 60, 61, 62, 63, 64, 65, 66, 67, 68, 69, 70, 71, 72, 73, 74, 75, 76, 77, 78, 79, 80, 81, 82, 83, 84, 85, 86, 87, 88, 89, 90, 91, 92, 93, 94, 95, 96, 97, 98, 99 or 100% sequence identity to SEQ ID NO: 181 or the cDNA sequence thereof;
[0789] d) a polypeptide derived from SEQ ID NO: 128 by substitution, deletion or insertion of one or more amino acids;
[0790] e) a polypeptide derived from a mature polypeptide of SEQ ID NO: 128 by substitution, deletion or insertion of one or more amino acids;
[0791] f) a polypeptide derived from the polypeptide of any one of a) through e) wherein the N- and/or C-terminal end has been extended by the addition of one or more amino acids; and
[0792] g) a fragment of the polypeptide of any one of a) through f)
   wherein the polypeptide has glucan endo-1,3-beta-D-glucosidase activity.

[0793] In some embodiments, the protein is selected from the group consisting of:
[0794] a) a polypeptide having about/at least 60, 61, 62, 63, 64, 65, 66, 67, 68, 69, 70, 71, 72, 73, 74, 75, 76, 77, 78, 79, 80, 81, 82, 83, 84, 85, 86, 87, 88, 89, 90, 91, 92, 93, 94, 95, 96, 97, 98, 99 or 100% sequence identity to SEQ ID NO: 129;
[0795] b) a polypeptide having about/at least 60, 61, 62, 63, 64, 65, 66, 67, 68, 69, 70, 71, 72, 73, 74, 75, 76, 77, 78, 79, 80, 81, 82, 83, 84, 85, 86, 87, 88, 89, 90, 91, 92, 93, 94, 95, 96, 97, 98, 99 or 100% sequence identity to a mature polypeptide of SEQ ID NO: 129;
[0796] c) a polypeptide encoded by a polynucleotide having about/at least 60, 61, 62, 63, 64, 65, 66, 67, 68, 69, 70, 71, 72, 73, 74, 75, 76, 77, 78, 79, 80, 81, 82, 83, 84, 85, 86, 87, 88, 89, 90, 91, 92, 93, 94, 95, 96, 97, 98, 99 or 100% sequence identity to SEQ ID NO: 182 or the cDNA sequence thereof;
[0797] d) a polypeptide derived from SEQ ID NO: 129 by substitution, deletion or insertion of one or more amino acids;
[0798] e) a polypeptide derived from a mature polypeptide of SEQ ID NO: 129 by substitution, deletion or insertion of one or more amino acids;
[0799] f) a polypeptide derived from the polypeptide of any one of a) through e) wherein the N- and/or C-terminal end has been extended by the addition of one or more amino acids; and
[0800] g) a fragment of the polypeptide of any one of a) through f)
   wherein the polypeptide has alpha-L-arabinofuranosidase activity.

[0801] In some embodiments, the protein is selected from the group consisting of:
[0802] a) a polypeptide having about/at least 60, 61, 62, 63, 64, 65, 66, 67, 68, 69, 70, 71, 72, 73, 74, 75, 76, 77, 78, 79, 80, 81, 82, 83, 84, 85, 86, 87, 88, 89, 90, 91, 92, 93, 94, 95, 96, 97, 98, 99 or 100% sequence identity to SEQ ID NO: 130;
[0803] b) a polypeptide having about/at least 60, 61, 62, 63, 64, 65, 66, 67, 68, 69, 70, 71, 72, 73, 74, 75, 76, 77, 78, 79, 80, 81, 82, 83, 84, 85, 86, 87, 88, 89, 90, 91, 92, 93, 94, 95, 96, 97, 98, 99 or 100% sequence identity to a mature polypeptide of SEQ ID NO: 130;
[0804] c) a polypeptide encoded by a polynucleotide having about/at least 60, 61, 62, 63, 64, 65, 66, 67, 68, 69, 70, 71, 72, 73, 74, 75, 76, 77, 78, 79, 80, 81, 82, 83, 84, 85, 86, 87, 88, 89, 90, 91, 92, 93, 94, 95, 96, 97, 98, 99 or 100% sequence identity to SEQ ID NO: 183 or the cDNA sequence thereof;
[0805] d) a polypeptide derived from SEQ ID NO: 130 by substitution, deletion or insertion of one or more amino acids;
[0806] e) a polypeptide derived from a mature polypeptide of SEQ ID NO: 130 by substitution, deletion or insertion of one or more amino acids;
[0807] f) a polypeptide derived from the polypeptide of any one of a) through e) wherein the N- and/or C-terminal end has been extended by the addition of one or more amino acids; and
[0808] g) a fragment of the polypeptide of any one of a) through f)
   wherein the polypeptide has glucan endo-1,3-alpha-glucosidase activity.

[0809] In some embodiments, the protein is selected from the group consisting of:
[0810] a) a polypeptide having about/at least 60, 61, 62, 63, 64, 65, 66, 67, 68, 69, 70, 71, 72, 73, 74, 75, 76, 77, 78, 79, 80, 81, 82, 83, 84, 85, 86, 87, 88, 89, 90, 91, 92, 93, 94, 95, 96, 97, 98, 99 or 100% sequence identity to SEQ ID NO: 131;
[0811] b) a polypeptide having about/at least 60, 61, 62, 63, 64, 65, 66, 67, 68, 69, 70, 71, 72, 73, 74, 75, 76, 77, 78, 79, 80, 81, 82, 83, 84, 85, 86, 87, 88, 89, 90, 91, 92, 93, 94, 95, 96, 97, 98, 99 or 100% sequence identity to a mature polypeptide of SEQ ID NO: 131;
[0812] c) a polypeptide encoded by a polynucleotide having about/at least 60, 61, 62, 63, 64, 65, 66, 67, 68, 69, 70, 71, 72, 73, 74, 75, 76, 77, 78, 79, 80, 81, 82, 83, 84, 85, 86, 87, 88, 89, 90, 91, 92, 93, 94, 95, 96, 97, 98, 99 or 100% sequence identity to SEQ ID NO: 184 or the cDNA sequence thereof;
[0813] d) a polypeptide derived from SEQ ID NO: 131 by substitution, deletion or insertion of one or more amino acids;
[0814] e) a polypeptide derived from a mature polypeptide of SEQ ID NO: 132 by substitution, deletion or insertion of one or more amino acids;
[0815] f) a polypeptide derived from the polypeptide of any one of a) through e) wherein the N- and/or C-terminal end has been extended by the addition of one or more amino acids; and
[0816] g) a fragment of the polypeptide of any one of a) through f)
   wherein the polypeptide has glucan endo-1,3-alpha-glucosidase activity.

[0817] In some embodiments, the protein is selected from the group consisting of:
[0818] a) a polypeptide having about/at least 60, 61, 62, 63, 64, 65, 66, 67, 68, 69, 70, 71, 72, 73, 74, 75, 76, 77, 78, 79, 80, 81, 82, 83, 84, 85, 86, 87, 88, 89, 90, 91, 92, 93, 94, 95, 96, 97, 98, 99 or 100% sequence identity to SEQ ID NO: 132;
[0819] b) a polypeptide having about/at least 60, 61, 62, 63, 64, 65, 66, 67, 68, 69, 70, 71, 72, 73, 74, 75, 76, 77, 78, 79, 80, 81, 82, 83, 84, 85, 86, 87, 88, 89, 90, 91, 92, 93, 94, 95, 96, 97, 98, 99 or 100% sequence identity to a mature polypeptide of SEQ ID NO: 132;
[0820] c) a polypeptide encoded by a polynucleotide having about/at least 60, 61, 62, 63, 64, 65, 66, 67, 68, 69, 70, 71, 72, 73, 74, 75, 76, 77, 78, 79, 80, 81, 82, 83, 84, 85, 86, 87, 88, 89, 90, 91, 92, 93, 94, 95, 96, 97, 98, 99 or 100% sequence identity to SEQ ID NO: 185 or the cDNA sequence thereof;
[0821] d) a polypeptide derived from SEQ ID NO: 132 by substitution, deletion or insertion of one or more amino acids;
[0822] e) a polypeptide derived from a mature polypeptide of SEQ ID NO: 132 by substitution, deletion or insertion of one or more amino acids;
[0823] f) a polypeptide derived from the polypeptide of any one of a) through e) wherein the N- and/or C-terminal end has been extended by the addition of one or more amino acids; and
[0824] g) a fragment of the polypeptide of any one of a) through f)
   wherein the polypeptide has licheninase activity.

[0825] In some embodiments, the protein is selected from the group consisting of:
[0826] a) a polypeptide having about/at least 60, 61, 62, 63, 64, 65, 66, 67, 68, 69, 70, 71, 72, 73, 74, 75, 76, 77, 78, 79, 80, 81, 82, 83, 84, 85, 86, 87, 88, 89, 90, 91, 92, 93, 94, 95, 96, 97, 98, 99 or 100% sequence identity to SEQ ID NO: 133;
[0827] b) a polypeptide having about/at least 60, 61, 62, 63, 64, 65, 66, 67, 68, 69, 70, 71, 72, 73, 74, 75, 76, 77, 78, 79, 80, 81, 82, 83, 84, 85, 86, 87, 88, 89, 90, 91, 92, 93, 94, 95, 96, 97, 98, 99 or 100% sequence identity to a mature polypeptide of SEQ ID NO: 133;
[0828] c) a polypeptide encoded by a polynucleotide having about/at least 60, 61, 62, 63, 64, 65, 66, 67, 68, 69, 70, 71, 72, 73, 74, 75, 76, 77, 78, 79, 80, 81, 82, 83, 84, 85, 86, 87, 88, 89, 90, 91, 92, 93, 94, 95, 96, 97, 98, 99 or 100% sequence identity to SEQ ID NO: 186 or the cDNA sequence thereof;
[0829] d) a polypeptide derived from SEQ ID NO: 133 by substitution, deletion or insertion of one or more amino acids;
[0830] e) a polypeptide derived from a mature polypeptide of SEQ ID NO: 133 by substitution, deletion or insertion of one or more amino acids;
[0831] f) a polypeptide derived from the polypeptide of any one of a) through e) wherein the N- and/or C-terminal end has been extended by the addition of one or more amino acids; and
[0832] g) a fragment of the polypeptide of any one of a) through f)
   wherein the polypeptide has glucan endo-1,6-beta-glucosidase activity.

[0833] In some embodiments, the protein is selected from the group consisting of:
[0834] a) a polypeptide having about/at least 60, 61, 62, 63, 64, 65, 66, 67, 68, 69, 70, 71, 72, 73, 74, 75, 76, 77, 78, 79, 80, 81, 82, 83, 84, 85, 86, 87, 88, 89, 90, 91, 92, 93, 94, 95, 96, 97, 98, 99 or 100% sequence identity to SEQ ID NO: 134;
[0835] b) a polypeptide having about/at least 60, 61, 62, 63, 64, 65, 66, 67, 68, 69, 70, 71, 72, 73, 74, 75, 76, 77, 78, 79, 80, 81, 82, 83, 84, 85, 86, 87, 88, 89, 90, 91, 92, 93, 94, 95, 96, 97, 98, 99 or 100% sequence identity to a mature polypeptide of SEQ ID NO: 134;
[0836] c) a polypeptide encoded by a polynucleotide having about/at least 60, 61, 62, 63, 64, 65, 66, 67, 68, 69, 70, 71, 72, 73, 74, 75, 76, 77, 78, 79, 80, 81, 82, 83, 84, 85, 86, 87, 88, 89, 90, 91, 92, 93, 94, 95, 96, 97, 98, 99 or 100% sequence identity to SEQ ID NO: 187 or the cDNA sequence thereof;
[0837] d) a polypeptide derived from SEQ ID NO: 134 by substitution, deletion or insertion of one or more amino acids;
[0838] e) a polypeptide derived from a mature polypeptide of SEQ ID NO: 134 by substitution, deletion or insertion of one or more amino acids;
[0839] f) a polypeptide derived from the polypeptide of any one of a) through e) wherein the N- and/or C-terminal end has been extended by the addition of one or more amino acids; and
[0840] g) a fragment of the polypeptide of any one of a) through f)
   wherein the polypeptide has mannan endo-1,4-$-mannosidase activity.

[0841] In some embodiments, the protein is selected from the group consisting of:
[0842] a) a polypeptide having about/at least 60, 61, 62, 63, 64, 65, 66, 67, 68, 69, 70, 71, 72, 73, 74, 75, 76, 77, 78, 79, 80, 81, 82, 83, 84, 85, 86, 87, 88, 89, 90, 91, 92, 93, 94, 95, 96, 97, 98, 99 or 100% sequence identity to SEQ ID NO: 135;
[0843] b) a polypeptide having about/at least 60, 61, 62, 63, 64, 65, 66, 67, 68, 69, 70, 71, 72, 73, 74, 75, 76, 77, 78, 79, 80, 81, 82, 83, 84, 85, 86, 87, 88, 89, 90, 91, 92, 93, 94, 95, 96, 97, 98, 99 or 100% sequence identity to a mature polypeptide of SEQ ID NO: 135;
[0844] c) a polypeptide encoded by a polynucleotide having about/at least 60, 61, 62, 63, 64, 65, 66, 67, 68, 69, 70, 71, 72, 73, 74, 75, 76, 77, 78, 79, 80, 81, 82, 83, 84, 85, 86, 87, 88, 89, 90, 91, 92, 93, 94, 95, 96, 97, 98, 99 or 100% sequence identity to SEQ ID NO: 188 or the cDNA sequence thereof;
[0845] d) a polypeptide derived from SEQ ID NO: 135 by substitution, deletion or insertion of one or more amino acids;
[0846] e) a polypeptide derived from a mature polypeptide of SEQ ID NO: 135 by substitution, deletion or insertion of one or more amino acids;
[0847] f) a polypeptide derived from the polypeptide of any one of a) through e) wherein the N- and/or C-terminal end has been extended by the addition of one or more amino acids; and
[0848] g) a fragment of the polypeptide of any one of a) through f)
   wherein the polypeptide has 1,4-beta-cellobiosidase activity.

[0849] In some embodiments, the protein is selected from the group consisting of:
[0850] a) a polypeptide having about/at least 60, 61, 62, 63, 64, 65, 66, 67, 68, 69, 70, 71, 72, 73, 74, 75, 76, 77, 78, 79, 80, 81, 82, 83, 84, 85, 86, 87, 88, 89, 90, 91, 92, 93, 94, 95, 96, 97, 98, 99 or 100% sequence identity to SEQ ID NO: 136;
[0851] b) a polypeptide having about/at least 60, 61, 62, 63, 64, 65, 66, 67, 68, 69, 70, 71, 72, 73, 74, 75, 76, 77, 78, 79, 80, 81, 82, 83, 84, 85, 86, 87, 88, 89, 90, 91, 92, 93, 94, 95, 96, 97, 98, 99 or 100% sequence identity to a mature polypeptide of SEQ ID NO: 136;
[0852] c) a polypeptide encoded by a polynucleotide having about/at least 60, 61, 62, 63, 64, 65, 66, 67, 68, 69, 70, 71, 72, 73, 74, 75, 76, 77, 78, 79, 80, 81, 82, 83, 84, 85, 86, 87, 88, 89, 90, 91, 92, 93, 94, 95, 96, 97, 98, 99 or 100% sequence identity to SEQ ID NO: 189 or the cDNA sequence thereof;
[0853] d) a polypeptide derived from SEQ ID NO: 136 by substitution, deletion or insertion of one or more amino acids;
[0854] e) a polypeptide derived from a mature polypeptide of SEQ ID NO: 136 by substitution, deletion or insertion of one or more amino acids;
[0855] f) a polypeptide derived from the polypeptide of any one of a) through e) wherein the N- and/or C-terminal end has been extended by the addition of one or more amino acids; and
[0856] g) a fragment of the polypeptide of any one of a) through f)
   wherein the polypeptide has mannan endo-1,6-alpha-mannosidase activity.

[0857] In some embodiments, the protein is selected from the group consisting of:
[0858] a) a polypeptide having about/at least 60, 61, 62, 63, 64, 65, 66, 67, 68, 69, 70, 71, 72, 73, 74, 75, 76, 77, 78, 79, 80, 81, 82, 83, 84, 85, 86, 87, 88, 89, 90, 91, 92, 93, 94, 95, 96, 97, 98, 99 or 100% sequence identity to SEQ ID NO: 137;
[0859] b) a polypeptide having about/at least 60, 61, 62, 63, 64, 65, 66, 67, 68, 69, 70, 71, 72, 73, 74, 75, 76, 77, 78, 79, 80, 81, 82, 83, 84, 85, 86, 87, 88, 89, 90, 91, 92, 93, 94, 95, 96, 97, 98, 99 or 100% sequence identity to a mature polypeptide of SEQ ID NO: 137;
[0860] c) a polypeptide encoded by a polynucleotide having about/at least 60, 61, 62, 63, 64, 65, 66, 67, 68, 69, 70, 71, 72, 73, 74, 75, 76, 77, 78, 79, 80, 81, 82, 83, 84, 85, 86, 87, 88, 89, 90, 91, 92, 93, 94, 95, 96, 97, 98, 99 or 100% sequence identity to SEQ ID NO: 190 or the cDNA sequence thereof;
[0861] d) a polypeptide derived from SEQ ID NO: 137 by substitution, deletion or insertion of one or more amino acids;
[0862] e) a polypeptide derived from a mature polypeptide of SEQ ID NO: 137 by substitution, deletion or insertion of one or more amino acids;
[0863] f) a polypeptide derived from the polypeptide of any one of a) through e) wherein the N- and/or C-terminal end has been extended by the addition of one or more amino acids; and
[0864] g) a fragment of the polypeptide of any one of a) through f)
   wherein the polypeptide has endogalactosaminidase activity.

[0865] In some embodiments, the protein is selected from the group consisting of:
[0866] a) a polypeptide having about/at least 60, 61, 62, 63, 64, 65, 66, 67, 68, 69, 70, 71, 72, 73, 74, 75, 76, 77, 78, 79, 80, 81, 82, 83, 84, 85, 86, 87, 88, 89, 90, 91, 92, 93, 94, 95, 96, 97, 98, 99 or 100% sequence identity to SEQ ID NO: 138;
[0867] b) a polypeptide having about/at least 60, 61, 62, 63, 64, 65, 66, 67, 68, 69, 70, 71, 72, 73, 74, 75, 76, 77, 78, 79, 80, 81, 82, 83, 84, 85, 86, 87, 88, 89, 90, 91, 92, 93, 94, 95, 96, 97, 98, 99 or 100% sequence identity to a mature polypeptide of SEQ ID NO: 138;
[0868] c) a polypeptide encoded by a polynucleotide having about/at least 60, 61, 62, 63, 64, 65, 66, 67, 68, 69, 70, 71, 72, 73, 74, 75, 76, 77, 78, 79, 80, 81, 82, 83, 84, 85, 86, 87, 88, 89, 90, 91, 92, 93, 94, 95, 96, 97, 98, 99 or 100% sequence identity to SEQ ID NO: 191 or the cDNA sequence thereof;
[0869] d) a polypeptide derived from SEQ ID NO: 138 by substitution, deletion or insertion of one or more amino acids;
[0870] e) a polypeptide derived from a mature polypeptide of SEQ ID NO: 138 by substitution, deletion or insertion of one or more amino acids;
[0871] f) a polypeptide derived from the polypeptide of any one of a) through e) wherein the N- and/or C-terminal end has been extended by the addition of one or more amino acids; and
[0872] g) a fragment of the polypeptide of any one of a) through f)
   wherein the polypeptide has endogalactosaminidase activity.

[0873] In some embodiments, the protein is selected from the group consisting of:
[0874] a) a polypeptide having about/at least 60, 61, 62, 63, 64, 65, 66, 67, 68, 69, 70, 71, 72, 73, 74, 75, 76, 77, 78, 79, 80, 81, 82, 83, 84, 85, 86, 87, 88, 89, 90, 91, 92, 93, 94, 95, 96, 97, 98, 99 or 100% sequence identity to SEQ ID NO: 139;
[0875] b) a polypeptide having about/at least 60, 61, 62, 63, 64, 65, 66, 67, 68, 69, 70, 71, 72, 73, 74, 75, 76, 77, 78, 79, 80, 81, 82, 83, 84, 85, 86, 87, 88, 89, 90, 91, 92, 93, 94, 95, 96, 97, 98, 99 or 100% sequence identity to a mature polypeptide of SEQ ID NO: 139;
[0876] c) a polypeptide encoded by a polynucleotide having about/at least 60, 61, 62, 63, 64, 65, 66, 67, 68, 69, 70, 71, 72, 73, 74, 75, 76, 77, 78, 79, 80, 81, 82, 83, 84, 85, 86, 87, 88, 89, 90, 91, 92, 93, 94, 95, 96, 97, 98, 99 or 100% sequence identity to SEQ ID NO: 192 or the cDNA sequence thereof;
[0877] d) a polypeptide derived from SEQ ID NO: 139 by substitution, deletion or insertion of one or more amino acids;
[0878] e) a polypeptide derived from a mature polypeptide of SEQ ID NO: 139 by substitution, deletion or insertion of one or more amino acids;
[0879] f) a polypeptide derived from the polypeptide of any one of a) through e) wherein the N- and/or C-terminal end has been extended by the addition of one or more amino acids; and
[0880] g) a fragment of the polypeptide of any one of a) through f)
   wherein the polypeptide has chitosanase activity.

[0881] In some embodiments, the protein is selected from the group consisting of:
[0882] a) a polypeptide having about/at least 60, 61, 62, 63, 64, 65, 66, 67, 68, 69, 70, 71, 72, 73, 74, 75, 76, 77, 78, 79, 80, 81, 82, 83, 84, 85, 86, 87, 88, 89, 90, 91, 92, 93, 94, 95, 96, 97, 98, 99 or 100% sequence identity to SEQ ID NO: 140;
[0883] b) a polypeptide having about/at least 60, 61, 62, 63, 64, 65, 66, 67, 68, 69, 70, 71, 72, 73, 74, 75, 76, 77, 78, 79, 80, 81, 82, 83, 84, 85, 86, 87, 88, 89, 90, 91, 92, 93, 94, 95, 96, 97, 98, 99 or 100% sequence identity to a mature polypeptide of SEQ ID NO: 140;
[0884] c) a polypeptide encoded by a polynucleotide having about/at least 60, 61, 62, 63, 64, 65, 66, 67, 68, 69, 70, 71, 72, 73, 74, 75, 76, 77, 78, 79, 80, 81, 82, 83, 84, 85, 86, 87, 88, 89, 90, 91, 92, 93, 94, 95, 96, 97, 98, 99 or 100% sequence identity to SEQ ID NO: 193 or the cDNA sequence thereof;
[0885] d) a polypeptide derived from SEQ ID NO: 140 by substitution, deletion or insertion of one or more amino acids;
[0886] e) a polypeptide derived from a mature polypeptide of SEQ ID NO: 140 by substitution, deletion or insertion of one or more amino acids;
[0887] f) a polypeptide derived from the polypeptide of any one of a) through e) wherein the N- and/or C-terminal end has been extended by the addition of one or more amino acids; and
[0888] g) a fragment of the polypeptide of any one of a) through f)
   wherein the polypeptide has chitosanase activity.

[0889] In some embodiments, the protein is selected from the group consisting of:
[0890] a) a polypeptide having about/at least 60, 61, 62, 63, 64, 65, 66, 67, 68, 69, 70, 71, 72, 73, 74, 75, 76, 77, 78, 79, 80, 81, 82, 83, 84, 85, 86, 87, 88, 89, 90, 91, 92, 93, 94, 95, 96, 97, 98, 99 or 100% sequence identity to SEQ ID NO: 141;
[0891] b) a polypeptide having about/at least 60, 61, 62, 63, 64, 65, 66, 67, 68, 69, 70, 71, 72, 73, 74, 75, 76, 77, 78, 79, 80, 81, 82, 83, 84, 85, 86, 87, 88, 89, 90, 91, 92, 93, 94, 95, 96, 97, 98, 99 or 100% sequence identity to a mature polypeptide of SEQ ID NO: 141;
[0892] c) a polypeptide encoded by a polynucleotide having about/at least 60, 61, 62, 63, 64, 65, 66, 67, 68, 69, 70, 71, 72, 73, 74, 75, 76, 77, 78, 79, 80, 81, 82, 83, 84, 85, 86, 87, 88, 89, 90, 91, 92, 93, 94, 95, 96, 97, 98, 99 or 100% sequence identity to SEQ ID NO: 194 or the cDNA sequence thereof;
[0893] d) a polypeptide derived from SEQ ID NO: 141 by substitution, deletion or insertion of one or more amino acids;
[0894] e) a polypeptide derived from a mature polypeptide of SEQ ID NO: 141 by substitution, deletion or insertion of one or more amino acids;
[0895] f) a polypeptide derived from the polypeptide of any one of a) through e) wherein the N- and/or C-terminal end has been extended by the addition of one or more amino acids; and
[0896] g) a fragment of the polypeptide of any one of a) through f)
   wherein the polypeptide has chitinase activity.

[0897] In some embodiments, the protein is selected from the group consisting of:
[0898] a) a polypeptide having about/at least 60, 61, 62, 63, 64, 65, 66, 67, 68, 69, 70, 71, 72, 73, 74, 75, 76, 77, 78, 79, 80, 81, 82, 83, 84, 85, 86, 87, 88, 89, 90, 91, 92, 93, 94, 95, 96, 97, 98, 99 or 100% sequence identity to SEQ ID NO: 142;
[0899] b) a polypeptide having about/at least 60, 61, 62, 63, 64, 65, 66, 67, 68, 69, 70, 71, 72, 73, 74, 75, 76, 77, 78, 79, 80, 81, 82, 83, 84, 85, 86, 87, 88, 89, 90, 91, 92, 93, 94, 95, 96, 97, 98, 99 or 100% sequence identity to a mature polypeptide of SEQ ID NO: 142;
[0900] c) a polypeptide encoded by a polynucleotide having about/at least 60, 61, 62, 63, 64, 65, 66, 67, 68, 69, 70, 71, 72, 73, 74, 75, 76, 77, 78, 79, 80, 81, 82, 83, 84, 85, 86, 87, 88, 89, 90, 91, 92, 93, 94, 95, 96, 97, 98, 99 or 100% sequence identity to SEQ ID NO: 195 or the cDNA sequence thereof;
[0901] d) a polypeptide derived from SEQ ID NO: 142 by substitution, deletion or insertion of one or more amino acids;
[0902] e) a polypeptide derived from a mature polypeptide of SEQ ID NO: 142 by substitution, deletion or insertion of one or more amino acids;
[0903] f) a polypeptide derived from the polypeptide of any one of a) through e) wherein the N- and/or C-terminal end has been extended by the addition of one or more amino acids; and
[0904] g) a fragment of the polypeptide of any one of a) through f)
   wherein the polypeptide has 1,4-beta-cellobiosidase activity.

[0905] In some embodiments, the protein is selected from the group consisting of:
[0906] a) a polypeptide having about/at least 60, 61, 62, 63, 64, 65, 66, 67, 68, 69, 70, 71, 72, 73, 74, 75, 76, 77, 78, 79, 80, 81, 82, 83, 84, 85, 86, 87, 88, 89, 90, 91, 92, 93, 94, 95, 96, 97, 98, 99 or 100% sequence identity to SEQ ID NO: 143;
[0907] b) a polypeptide having about/at least 60, 61, 62, 63, 64, 65, 66, 67, 68, 69, 70, 71, 72, 73, 74, 75, 76, 77, 78, 79, 80, 81, 82, 83, 84, 85, 86, 87, 88, 89, 90, 91, 92, 93, 94, 95, 96, 97, 98, 99 or 100% sequence identity to a mature polypeptide of SEQ ID NO: 143;
[0908] c) a polypeptide encoded by a polynucleotide having about/at least 60, 61, 62, 63, 64, 65, 66, 67, 68, 69, 70, 71, 72, 73, 74, 75, 76, 77, 78, 79, 80, 81, 82, 83, 84, 85, 86, 87, 88, 89, 90, 91, 92, 93, 94, 95, 96, 97, 98, 99 or 100% sequence identity to SEQ ID NO: 196 or the cDNA sequence thereof;
[0909] d) a polypeptide derived from SEQ ID NO: 143 by substitution, deletion or insertion of one or more amino acids;
[0910] e) a polypeptide derived from a mature polypeptide of SEQ ID NO: 143 by substitution, deletion or insertion of one or more amino acids;
[0911] f) a polypeptide derived from the polypeptide of any one of a) through e) wherein the N- and/or C-terminal end has been extended by the addition of one or more amino acids; and
[0912] g) a fragment of the polypeptide of any one of a) through f)
   wherein the polypeptide has 1,4-beta-cellobiosidase activity.

[0913] In some embodiments, the protein is selected from the group consisting of:
[0914] a) a polypeptide having about/at least 60, 61, 62, 63, 64, 65, 66, 67, 68, 69, 70, 71, 72, 73, 74, 75, 76, 77, 78, 79, 80, 81, 82, 83, 84, 85, 86, 87, 88, 89, 90, 91, 92, 93, 94, 95, 96, 97, 98, 99 or 100% sequence identity to SEQ ID NO: 144;
[0915] b) a polypeptide having about/at least 60, 61, 62, 63, 64, 65, 66, 67, 68, 69, 70, 71, 72, 73, 74, 75, 76, 77, 78, 79, 80, 81, 82, 83, 84, 85, 86, 87, 88, 89, 90, 91, 92, 93, 94, 95, 96, 97, 98, 99 or 100% sequence identity to a mature polypeptide of SEQ ID NO: 144;
[0916] c) a polypeptide encoded by a polynucleotide having about/at least 60, 61, 62, 63, 64, 65, 66, 67, 68, 69, 70, 71, 72, 73, 74, 75, 76, 77, 78, 79, 80, 81, 82, 83, 84, 85, 86, 87, 88, 89, 90, 91, 92, 93, 94, 95, 96, 97, 98, 99 or 100% sequence identity to SEQ ID NO: 197 or the cDNA sequence thereof;
[0917] d) a polypeptide derived from SEQ ID NO: 144 by substitution, deletion or insertion of one or more amino acids;
[0918] e) a polypeptide derived from a mature polypeptide of SEQ ID NO: 144 by substitution, deletion or insertion of one or more amino acids;
[0919] f) a polypeptide derived from the polypeptide of any one of a) through e) wherein the N- and/or C-terminal end has been extended by the addition of one or more amino acids; and
[0920] g) a fragment of the polypeptide of any one of a) through f)
   wherein the polypeptide has serine endopeptidase activity.

[0921] In some embodiments, the protein is selected from the group consisting of:
[0922] a) a polypeptide having about/at least 60, 61, 62, 63, 64, 65, 66, 67, 68, 69, 70, 71, 72, 73, 74, 75, 76, 77, 78, 79, 80, 81, 82, 83, 84, 85, 86, 87, 88, 89, 90, 91, 92, 93, 94, 95, 96, 97, 98, 99 or 100% sequence identity to SEQ ID NO: 145;
[0923] b) a polypeptide having about/at least 60, 61, 62, 63, 64, 65, 66, 67, 68, 69, 70, 71, 72, 73, 74, 75, 76, 77, 78, 79, 80, 81, 82, 83, 84, 85, 86, 87, 88, 89, 90, 91, 92, 93, 94, 95, 96, 97, 98, 99 or 100% sequence identity to a mature polypeptide of SEQ ID NO: 145;
[0924] c) a polypeptide encoded by a polynucleotide having about/at least 60, 61, 62, 63, 64, 65, 66, 67, 68, 69, 70, 71, 72, 73, 74, 75, 76, 77, 78, 79, 80, 81, 82, 83, 84, 85, 86, 87, 88, 89, 90, 91, 92, 93, 94, 95, 96, 97, 98, 99 or 100% sequence identity to SEQ ID NO: 198 or the cDNA sequence thereof;
[0925] d) a polypeptide derived from SEQ ID NO: 145 by substitution, deletion or insertion of one or more amino acids;
[0926] e) a polypeptide derived from a mature polypeptide of SEQ ID NO: 145 by substitution, deletion or insertion of one or more amino acids;
[0927] f) a polypeptide derived from the polypeptide of any one of a) through e) wherein the N- and/or C-terminal end has been extended by the addition of one or more amino acids; and
[0928] g) a fragment of the polypeptide of any one of a) through f)
   wherein the polypeptide has subtilisin activity.

[0929] In some embodiments, the protein is selected from the group consisting of:
[0930] a) a polypeptide having about/at least 60, 61, 62, 63, 64, 65, 66, 67, 68, 69, 70, 71, 72, 73, 74, 75, 76, 77, 78, 79, 80, 81, 82, 83, 84, 85, 86, 87, 88, 89, 90, 91, 92, 93, 94, 95, 96, 97, 98, 99 or 100% sequence identity to SEQ ID NO: 146;
[0931] b) a polypeptide having about/at least 60, 61, 62, 63, 64, 65, 66, 67, 68, 69, 70, 71, 72, 73, 74, 75, 76, 77, 78, 79, 80, 81, 82, 83, 84, 85, 86, 87, 88, 89, 90, 91, 92, 93, 94, 95, 96, 97, 98, 99 or 100% sequence identity to a mature polypeptide of SEQ ID NO: 146;
[0932] c) a polypeptide encoded by a polynucleotide having about/at least 60, 61, 62, 63, 64, 65, 66, 67, 68, 69, 70, 71, 72, 73, 74, 75, 76, 77, 78, 79, 80, 81, 82, 83, 84, 85, 86, 87, 88, 89, 90, 91, 92, 93, 94, 95, 96, 97, 98, 99 or 100% sequence identity to SEQ ID NO: 199 or the cDNA sequence thereof;
[0933] d) a polypeptide derived from SEQ ID NO: 146 by substitution, deletion or insertion of one or more amino acids;
[0934] e) a polypeptide derived from a mature polypeptide of SEQ ID NO: 146 by substitution, deletion or insertion of one or more amino acids;
[0935] f) a polypeptide derived from the polypeptide of any one of a) through e) wherein the N- and/or C-terminal end has been extended by the addition of one or more amino acids; and
[0936] g) a fragment of the polypeptide of any one of a) through f)
   wherein the polypeptide has deacetylase activity.

[0937] In some embodiments, the protein is selected from the group consisting of:
[0938] a) a polypeptide having about/at least 60, 61, 62, 63, 64, 65, 66, 67, 68, 69, 70, 71, 72, 73, 74, 75, 76, 77, 78, 79, 80, 81, 82, 83, 84, 85, 86, 87, 88, 89, 90, 91, 92, 93, 94, 95, 96, 97, 98, 99 or 100% sequence identity to SEQ ID NO: 147;
[0939] b) a polypeptide having about/at least 60, 61, 62, 63, 64, 65, 66, 67, 68, 69, 70, 71, 72, 73, 74, 75, 76, 77, 78, 79, 80, 81, 82, 83, 84, 85, 86, 87, 88, 89, 90, 91, 92, 93, 94, 95, 96, 97, 98, 99 or 100% sequence identity to a mature polypeptide of SEQ ID NO: 147;
[0940] c) a polypeptide encoded by a polynucleotide having about/at least 60, 61, 62, 63, 64, 65, 66, 67, 68, 69, 70, 71, 72, 73, 74, 75, 76, 77, 78, 79, 80, 81, 82, 83, 84, 85, 86, 87, 88, 89, 90, 91, 92, 93, 94, 95, 96, 97, 98, 99 or 100% sequence identity to SEQ ID NO: 200 or the cDNA sequence thereof;
[0941] d) a polypeptide derived from SEQ ID NO: 147 by substitution, deletion or insertion of one or more amino acids;
[0942] e) a polypeptide derived from a mature polypeptide of SEQ ID NO: 147 by substitution, deletion or insertion of one or more amino acids;
[0943] f) a polypeptide derived from the polypeptide of any one of a) through e) wherein the N- and/or C-terminal end has been extended by the addition of one or more amino acids; and
[0944] g) a fragment of the polypeptide of any one of a) through f)
   wherein the polypeptide has deacetylase activity.

[0945] In some embodiments, the protein is selected from the group consisting of:
[0946] a) a polypeptide having about/at least 60, 61, 62, 63, 64, 65, 66, 67, 68, 69, 70, 71, 72, 73, 74, 75, 76, 77, 78, 79, 80, 81, 82, 83, 84, 85, 86, 87, 88, 89, 90, 91, 92, 93, 94, 95, 96, 97, 98, 99 or 100% sequence identity to SEQ ID NO: 148;
[0947] b) a polypeptide having about/at least 60, 61, 62, 63, 64, 65, 66, 67, 68, 69, 70, 71, 72, 73, 74, 75, 76, 77, 78, 79, 80, 81, 82, 83, 84, 85, 86, 87, 88, 89, 90, 91, 92, 93, 94, 95, 96, 97, 98, 99 or 100% sequence identity to a mature polypeptide of SEQ ID NO: 148;
[0948] c) a polypeptide encoded by a polynucleotide having about/at least 60, 61, 62, 63, 64, 65, 66, 67, 68, 69, 70, 71, 72, 73, 74, 75, 76, 77, 78, 79, 80, 81, 82, 83, 84, 85, 86, 87, 88, 89, 90, 91, 92, 93, 94, 95, 96, 97, 98, 99 or 100% sequence identity to SEQ ID NO: 201 or the cDNA sequence thereof;
[0949] d) a polypeptide derived from SEQ ID NO: 148 by substitution, deletion or insertion of one or more amino acids;
[0950] e) a polypeptide derived from a mature polypeptide of SEQ ID NO: 148 by substitution, deletion or insertion of one or more amino acids;
[0951] f) a polypeptide derived from the polypeptide of any one of a) through e) wherein the N- and/or C-terminal end has been extended by the addition of one or more amino acids; and
[0952] g) a fragment of the polypeptide of any one of a) through f)
   wherein the polypeptide has asparaginase activity.

[0953] In some embodiments, the protein is selected from the group consisting of:
[0954] a) a polypeptide having about/at least 60, 61, 62, 63, 64, 65, 66, 67, 68, 69, 70, 71, 72, 73, 74, 75, 76, 77, 78, 79, 80, 81, 82, 83, 84, 85, 86, 87, 88, 89, 90, 91, 92, 93, 94, 95, 96, 97, 98, 99 or 100% sequence identity to SEQ ID NO: 149;
[0955] b) a polypeptide having about/at least 60, 61, 62, 63, 64, 65, 66, 67, 68, 69, 70, 71, 72, 73, 74, 75, 76, 77, 78, 79, 80, 81, 82, 83, 84, 85, 86, 87, 88, 89, 90, 91, 92, 93, 94, 95, 96, 97, 98, 99 or 100% sequence identity to a mature polypeptide of SEQ ID NO: 149;
[0956] c) a polypeptide encoded by a polynucleotide having about/at least 60, 61, 62, 63, 64, 65, 66, 67, 68, 69, 70, 71, 72, 73, 74, 75, 76, 77, 78, 79, 80, 81, 82, 83, 84, 85, 86, 87, 88, 89, 90, 91, 92, 93, 94, 95, 96, 97, 98, 99 or 100% sequence identity to SEQ ID NO: 202 or the cDNA sequence thereof;
[0957] d) a polypeptide derived from SEQ ID NO: 149 by substitution, deletion or insertion of one or more amino acids;
[0958] e) a polypeptide derived from a mature polypeptide of SEQ ID NO: 149 by substitution, deletion or insertion of one or more amino acids;
[0959] f) a polypeptide derived from the polypeptide of any one of a) through e) wherein the N- and/or C-terminal end has been extended by the addition of one or more amino acids; and
[0960] g) a fragment of the polypeptide of any one of a) through f)
   wherein the polypeptide has pectate lyase activity.

[0961] In some embodiments, the protein is selected from the group consisting of:
[0962] a) a polypeptide having about/at least 60, 61, 62, 63, 64, 65, 66, 67, 68, 69, 70, 71, 72, 73, 74, 75, 76, 77, 78, 79, 80, 81, 82, 83, 84, 85, 86, 87, 88, 89, 90, 91, 92, 93, 94, 95, 96, 97, 98, 99 or 100% sequence identity to SEQ ID NO: 150;
[0963] b) a polypeptide having about/at least 60, 61, 62, 63, 64, 65, 66, 67, 68, 69, 70, 71, 72, 73, 74, 75, 76, 77, 78, 79, 80, 81, 82, 83, 84, 85, 86, 87, 88, 89, 90, 91, 92, 93, 94, 95, 96, 97, 98, 99 or 100% sequence identity to a mature polypeptide of SEQ ID NO: 150;
[0964] c) a polypeptide encoded by a polynucleotide having about/at least 60, 61, 62, 63, 64, 65, 66, 67, 68, 69, 70, 71, 72, 73, 74, 75, 76, 77, 78, 79, 80, 81, 82, 83, 84, 85, 86, 87, 88, 89, 90, 91, 92, 93, 94, 95, 96, 97, 98, 99 or 100% sequence identity to SEQ ID NO: 203 or the cDNA sequence thereof;
[0965] d) a polypeptide derived from SEQ ID NO: 150 by substitution, deletion or insertion of one or more amino acids;
[0966] e) a polypeptide derived from a mature polypeptide of SEQ ID NO: 150 by substitution, deletion or insertion of one or more amino acids;
[0967] f) a polypeptide derived from the polypeptide of any one of a) through e) wherein the N- and/or C-terminal end has been extended by the addition of one or more amino acids; and
[0968] g) a fragment of the polypeptide of any one of a) through f)
   wherein the polypeptide has endo-1,3(4)-beta-glucanase activity.

[0969] In some embodiments, the protein comprises, consists essentially of, or consists of a wild-type polypeptide. For example, in some embodiments, the protein comprises, consists essentially of, or consists of a wild-type polypeptide having about/at least 60, 61, 62, 63, 64, 65, 66, 67, 68, 69, 70, 71, 72, 73, 74, 75, 76, 77, 78, 79, 80, 81, 82, 83, 84, 85, 86, 87, 88, 89, 90, 91, 92, 93, 94, 95, 96, 97, 98, 99 or 100% sequence identity to any one or more of SEQ ID NOs: 1-48 and 98-150 or a mature polypeptide thereof.

[0970] In some embodiments, the protein comprises, consists essentially of, or consists of a variant polypeptide. For example, in some embodiments, the protein comprises, consists essentially of, or consists of a variant polypeptide having about/at least 60, 61, 62, 63, 64, 65, 66, 67, 68, 69, 70, 71, 72, 73, 74, 75, 76, 77, 78, 79, 80, 81, 82, 83, 84, 85, 86, 87, 88, 89, 90, 91, 92, 93, 94, 95, 96, 97, 98, 99 or 100% sequence identity to any one or more of SEQ ID NOs: 1-48 and 98-150 or a mature polypeptide thereof.

[0971] In some embodiments, the protein comprises, consists essentially of or consists of a catalytic domain, a binding module and a linker between said catalytic domain and said binder module.

[0972] In some embodiments, the protein comprises two or more catalytic domains.

[0973] In some embodiments, the protein comprises two or more binding modules.

[0974] In some embodiments, the protein is a fusion protein comprising a first polypeptide and a second polypeptide, said second polypeptide being distinct from said first polypeptide, wherein said first polypeptide is selected from the group consisting of:
[0975] a) a polypeptide having about/at least 60, 61, 62, 63, 64, 65, 66, 67, 68, 69, 70, 71, 72, 73, 74, 75, 76, 77, 78, 79, 80, 81, 82, 83, 84, 85, 86, 87, 88, 89, 90, 91, 92, 93, 94, 95, 96, 97, 98, 99 or 100% sequence identity to any one or more of SEQ ID NOs: 1-48 and 98-150;
[0976] b) a polypeptide having about/at least 60, 61, 62, 63, 64, 65, 66, 67, 68, 69, 70, 71, 72, 73, 74, 75, 76, 77, 78, 79, 80, 81, 82, 83, 84, 85, 86, 87, 88, 89, 90, 91, 92, 93, 94, 95, 96, 97, 98, 99 or 100% sequence identity to a mature polypeptide of any one or more of SEQ ID NOs: 1-48 and 98-150;
[0977] c) a polypeptide encoded by a polynucleotide having about/at least 60, 61, 62, 63, 64, 65, 66, 67, 68, 69, 70, 71, 72, 73, 74, 75, 76, 77, 78, 79, 80, 81, 82, 83, 84, 85, 86, 87, 88, 89, 90, 91, 92, 93, 94, 95, 96, 97, 98, 99 or 100% sequence identity to any one or more of SEQ ID NOs: 49-97 and 151-203 or the cDNA sequence thereof; d) a polypeptide derived from any one of SEQ ID NOs: 1-48 and 98-150 by substitution, deletion or insertion of one or more amino acids;
[0978] e) a polypeptide derived from a mature polypeptide any one of SEQ ID NOs: 1-48 and 98-150 by substitution, deletion or insertion of one or more amino acids;
[0979] f) a polypeptide derived from the polypeptide of any one of a) through e) wherein the N- and/or C-terminal end has been extended by the addition of one or more amino acids; and
[0980] g) a fragment of the polypeptide of any one of a) through f), and, optionally, wherein said second polypeptide is selected from the group consisting of:
[0981] h) a polypeptide having about/at least 60, 61, 62, 63, 64, 65, 66, 67, 68, 69, 70, 71, 72, 73, 74, 75, 76, 77, 78, 79, 80, 81, 82, 83, 84, 85, 86, 87, 88, 89, 90, 91, 92, 93, 94, 95, 96, 97, 98, 99 or 100% sequence identity to any one or more of SEQ ID NOs: 1-48 and 98-150;
[0982] i) a polypeptide having about/at least 60, 61, 62, 63, 64, 65, 66, 67, 68, 69, 70, 71, 72, 73, 74, 75, 76, 77, 78, 79, 80, 81, 82, 83, 84, 85, 86, 87, 88, 89, 90, 91, 92, 93, 94, 95, 96, 97, 98, 99 or 100% sequence identity to a mature polypeptide of any one or more of SEQ ID NOs: 1-48 and 98-150;
[0983] j) a polypeptide encoded by a polynucleotide having about/at least 60, 61, 62, 63, 64, 65, 66, 67, 68, 69, 70, 71, 72, 73, 74, 75, 76, 77, 78, 79, 80, 81, 82, 83, 84, 85, 86, 87, 88, 89, 90, 91, 92, 93, 94, 95, 96, 97, 98, 99 or 100% sequence identity to any one or more of SEQ ID NOs: 49-97 and 151-203 or the cDNA sequence thereof;
[0984] k) a polypeptide derived from any one of SEQ ID NOs: 1-48 and 98-150 by substitution, deletion or insertion of one or more amino acids;
[0985] l) a polypeptide derived from a mature polypeptide any one of SEQ ID NOs: 1-48 and 98-150 by substitution, deletion or insertion of one or more amino acids;
[0986] m) a polypeptide derived from the polypeptide of any one of h) through 1) wherein the N- and/or C-terminal end has been extended by the addition of one or more amino acids; and
[0987] n) a fragment of the polypeptide of any one of h) through m).

[0988] In preferred embodiments, proteins of the present disclosure comprise, consist essentially of or consist of the amino acid sequence of any one of SEQ ID NOs: 1-48 and 98-150 or a mature polypeptide thereof.

[0989] In preferred embodiments, proteins of the present disclosure are encoded by a polynucleotide that comprises, consists essentially of or consists of one of SEQ ID NOs: 49-97 and 151-203 or the cDNA thereof.

[0990] In some embodiments, proteins of the present disclosure comprise, consist essentially of or consist of a fragment of one of SEQ ID NOs: 1-48 and 98-150 or a mature peptide thereof. For example, the protein may be a fragment of any one of SEQ ID NOs: 1-48 and 98-150 or a mature peptide thereof, said fragment comprising at least 85, 86, 87, 88, 89, 90, 91, 92, 93, 94, 95, 96, 97, 98 or 99% of the amino acids found in the original protein.

[0991] As noted above, in some embodiments, proteins of the present disclosure comprise, consist essentially of or consist of any one of SEQ ID NOs: 1-48 and 98-150 or a mature polypeptide thereof with an N-terminal extension of one or more amino acids (e.g., 1, 2, 3, 4, 5, 6, 7, 8, 9, 10, 11, 12, 13, 14, 15, 16, 17, 18, 19, 20 or more amino acids), a C-terminal extension of one or more amino acids (e.g., 1, 2, 3, 4, 5, 6, 7, 8, 9, 10, 11, 12, 13, 14, 15, 16, 17, 18, 19, 20 or more amino acids), one or more substitutions (e.g., 1, 2, 3, 4, 5, 6, 7, 8, 9, 10, 11, 12, 13, 14, 15, 16, 17, 18, 19, 20 or more substitutions), one or more insertions (e.g., 1, 2, 3, 4, 5, 6, 7, 8, 9, 10, 11, 12, 13, 14, 15, 16, 17, 18, 19, 20 or more insertions), and/or one or more deletions (e.g., 1, 2, 3, 4, 5, 6, 7, 8, 9, 10, 11, 12, 13, 14, 15, 16, 17, 18, 19, 20 or more deletions). The amino acid changes may be of a minor nature, that is conservative amino acid substitutions or insertions that do not significantly affect the folding and/or activity of the protein; small deletions, typically of 1-30 amino acids; small amino- or carboxyl-terminal extensions, such as an amino-terminal methionine residue; a small linker peptide of up to 20-25 residues; or a small extension that facilitates purification by changing net charge or another function, such as a poly-histidine tract, an antigenic epitope or a binding module.

[0992] Essential amino acids in a polypeptide can be identified according to procedures known in the art, such as site-directed mutagenesis or alanine-scanning mutagenesis (Cunningham and Wells, 1989, Science 244: 1081-1085). In the latter technique, single alanine mutations are introduced at every residue in the molecule, and the resultant molecules are tested for catalytic activity to identify amino acid residues that are critical to the activity of the molecule. See also, Hilton et al., 1996, J. Biol. Chem. 271: 4699-4708. The active site of the enzyme or other biological interaction can also be determined by physical analysis of structure, as determined by such techniques as nuclear magnetic resonance, crystallography, electron diffraction, or photoaffinity labeling, in conjunction with mutation of putative contact site amino acids. See, for example, de Vos et al., 1992, Science 255: 306-312; Smith et al., 1992, J. Mol. Biol. 224: 899-904; Wlodaver et al., 1992, FEBS Lett. 309: 59-64. The identity of essential amino acids can also be inferred from an alignment with a related polypeptide, and/or be inferred from sequence homology and conserved catalytic machinery with a related polypeptide or within a polypeptide or protein family with polypeptides/proteins descending from a common ancestor, typically having similar three-dimensional structures, functions, and significant sequence similarity. Additionally or alternatively, protein structure prediction tools can be used for protein structure modelling to identify essential amino acids and/or active sites of polypeptides. See, for example, Jumper et al., 2021, “Highly accurate protein structure prediction with AlphaFold”, Nature 596: 583-589.

[0993] Single or multiple amino acid substitutions, deletions, and/or insertions can be made and tested using known methods of mutagenesis, recombination, and/or shuffling, followed by a relevant screening procedure, such as those disclosed by Reidhaar-Olson and Sauer, 1988, Science 241: 53-57; Bowie and Sauer, 1989, Proc. Natl. Acad. Sci. USA 86: 2152-2156; WO 95/17413; or WO 95/22625. Other methods that can be used include error-prone PCR, phage display (e.g., Lowman et al., 1991, Biochemistry 30: 10832-10837; U.S. Pat. No. 5,223,409; WO 92/06204), and region-directed mutagenesis (Derbyshire et al., 1986, Gene 46: 145; Ner et al., 1988, DNA 7: 127).

[0994] Mutagenesis/shuffling methods can be combined with high-throughput, automated screening methods to detect activity of cloned, mutagenized polypeptides expressed by host cells (Ness et al., 1999, Nature Biotechnology 17: 893-896). Mutagenized DNA molecules that encode active polypeptides can be recovered from the host cells and rapidly sequenced using standard methods in the art. These methods allow the rapid determination of the importance of individual amino acid residues in a polypeptide.

[0995] In some embodiments, the protein is a fusion protein (e.g., a fusion protein comprising a first polypeptide having a first enzymatic activity and a second polypeptide having a second enzymatic activity).

[0996] In some embodiments, the protein is a hybrid protein.

[0997] In some embodiments, the protein is isolated.

[0998] In some embodiments, the protein is purified.

[0999] It is to be understood that proteins of the present disclosure may be obtained from microorganisms of any genus. For purposes of the present disclosure, the term “obtained from” as used herein in connection with a given source shall mean that the protein encoded by a polynucleotide is produced by the source or by a strain in which the polynucleotide of the disclosure has been inserted. In one aspect, the protein obtained from a given source is secreted extracellularly.

[1000] In some embodiments, the protein is obtained from a Gram-negative bacteria, such as Campylobacter, Dicytoglomus (e.g., D. thermophilum), Escherichia (e.g., E. coli), Flavobacterium, Fusobacterium, Helicobacter, Ilyobacter, Neisseria, Pseudomonas, Salmonella or Ureaplasma.

[1001] In some embodiments, the protein is obtained from a Gram-positive bacteria, such as Bacillus (e.g., B. agaradhaerens, Bacillus alkalophilus, Bacillus amyloliquefaciens, Bacillus brevis, Bacillus circulans, Bacillus clausii, Bacillus coagulans, B. deramificans, Bacillus firmus, Bacillus lautus, Bacillus lentus, Bacillus licheniformis, Bacillus megaterium, Bacillus pumilus, Bacillus stearothermophilus, Bacillus subtilis, Bacillus thuringiensis), Clostridium, Enterococcus, Geobacillus, Lactobacillus, Lactococcus, Oceanobacillus (e.g., O. barbara), Staphylococcus, Streptococcus (e.g., Streptococcus equisimilis, Streptococcus pyogenes, Streptococcus uberis, and Streptococcus equi subsp. Zooepidemicus) or Streptomyces (e.g., Streptomyces achromogenes, Streptomyces avermitilis, Streptomyces coelicolor, Streptomyces griseus, Streptomyces lividans).

[1002] In some embodiments, the protein is obtained from a fungus, such as Acremonium, Aspergillus (e.g., A. aculeatus, Aspergillus awamori, Aspergillus foetidus, Aspergillus fumigatus, Aspergillus japonicus, Aspergillus nidulans, Aspergillus niger, Aspergillus oryzae), Aureobasidium, Bjerkandera (e.g., Bjerkandera adusta), Ceriporiopsis (e.g., Ceriporiopsis aneirina, Ceriporiopsis caregiea, Ceriporiopsis gilvescens, Ceriporiopsis pannocinta, Ceriporiopsis rivulosa, Ceriporiopsis subrufa, Ceriporiopsis subvermispora), Chaetomium (e.g., C. erraticum), Chrysosporium (e.g., Chrysosporium inops, Chrysosporium keratinophilum, Chrysosporium lucknowense, Chrysosporium merdarium, Chrysosporium pannicola, Chrysosporium queenslandicum, Chrysosporium tropicum, Chrysosporium zonatum), Coprinus (e.g., Coprinus cinereus), Coriolus (e.g., Coriolus hirsutus), Cryptococcus, Filibasidium, Fusarium (e.g., Fusarium bactridioides, Fusarium cerealis, Fusarium crookwellense, Fusarium culmorum, Fusarium graminearum, Fusarium graminum, Fusarium heterosporum, Fusarium negundi, Fusarium oxysporum, Fusarium reticulatum, Fusarium roseum, Fusarium sambucinum, Fusarium sarcochroum, F. solani, Fusarium sporotrichioides, Fusarium sulphureum, Fusarium torulosum, Fusarium trichothecioides, Fusarium venenatum), Humicola (e.g., Humicola insolens, Humicola lanuginosa), Magnaporthe, Microdochium (e.g., M. nivale), Mucor (e.g., Mucor miehei), Myceliophthora (e.g., Myceliophthora thermophila), Neocallimastix, Neurospora (e.g., Neurospora crassa), Paecilomyces, Penicillium (e.g., Penicillium purpurogenum), Phanerochaete (e.g., Phanerochaete chrysosporium), Phlebia (e.g., Phlebia radiata), Piromyces, Pleurotus (e.g., Pleurotus eryngii), Schizophyllum, Talaromyces (e.g., Talaromyces emersonii), Thermoascus (e.g., T. aurantiacus), Thielavia (e.g., Thielavia terrestris), Tolypocladium, Trametes (e.g., Trametes villosa, Trametes versicolor), or Trichoderma (e.g., T. atroviride, Trichoderma harzianum, Trichoderma koningii, Trichoderma longibrachiatum, Trichoderma reesei, Trichoderma viride).

[1003] In some embodiments, the protein is obtained from a yeast, such as Candida, Hansenula, Kluyveromyces (e.g., Kluyveromyces lactis), Pichia, Saccharomyces (e.g., Saccharomyces carlsbergensis, Saccharomyces cerevisiae, Saccharomyces diastaticus, Saccharomyces douglasii, Saccharomyces kluyveri, Saccharomyces norbensis, Saccharomyces oviformis), Schizosaccharomyces, or Yarrowia (e.g., Yarrowia lipolytica).

[1004] It will be understood that for the aforementioned species, the disclosure encompasses both the perfect and imperfect states, and other taxonomic equivalents, e.g., anamorphs, regardless of the species name by which they are known. Those skilled in the art will readily recognize the identity of appropriate equivalents.

[1005] The proteins may be identified and obtained from other sources including microorganisms isolated from nature (e.g., soil, composts, water, etc.) or DNA samples obtained directly from natural materials (e.g., soil, composts, water, etc.) using the above-mentioned probes. Techniques for isolating microorganisms and DNA directly from natural habitats are well known in the art. A polynucleotide encoding the protein may then be obtained by similarly screening a genomic DNA or cDNA library of another microorganism or mixed DNA sample. Once a polynucleotide encoding a protein has been detected with the probe(s), the polynucleotide can be isolated or cloned by utilizing techniques that are known to those of ordinary skill in the art (see, e.g., Davis et al., 2012, Basic Methods in Molecular Biology, Elsevier).

[1006] It is to be understood that proteins of the present disclosure may be produced using any suitable method(s), including, but not limited to, shake flask cultivation and large-scale fermentation (including continuous, batch, fed-batch, solid-state and/or microcarrier-based fermentation) methods.

[1007] The present disclosure extends to methods of producing a protein of the present disclosure, comprising (a) cultivating a cell, which in its wild-type form produces the protein, under conditions conducive for production of the protein; and optionally, (b) recovering the protein.

[1008] In some embodiments, the cell is a Gram-negative bacterial cell, such as Campylobacter, Escherichia (e.g., E. coli), Flavobacterium, Fusobacterium, Helicobacter, Ilyobacter, Neisseria, Pseudomonas, Salmonella or Ureaplasma.

[1009] In some embodiments, the cell is a Gram-positive bacterial cell, such as Bacillus (e.g., Bacillus alkalophilus, Bacillus amyloliquefaciens, Bacillus brevis, Bacillus circulans, Bacillus clausii, Bacillus coagulans, Bacillus firmus, Bacillus lautus, Bacillus lentus, Bacillus licheniformis, Bacillus megaterium, Bacillus pumilus, Bacillus stearothermophilus, Bacillus subtilis, Bacillus thuringiensis), Clostridium, Enterococcus, Geobacillus, Lactobacillus, Lactococcus, Oceanobacillus, Staphylococcus, Streptococcus (e.g., Streptococcus equisimilis, Streptococcus pyogenes, Streptococcus uberis, and Streptococcus equi subsp. Zooepidemicus) or Streptomyces (e.g., Streptomyces achromogenes, Streptomyces avermitilis, Streptomyces coelicolor, Streptomyces griseus, Streptomyces lividans).

[1010] In some embodiments, the cell is a fungal cell, such as Acremonium, Aspergillus (e.g., Aspergillus awamori, Aspergillus foetidus, Aspergillus fumigatus, Aspergillus japonicus, Aspergillus nidulans, Aspergillus niger, Aspergillus oryzae), Aureobasidium, Bjerkandera (e.g., Bjerkandera adusta), Ceriporiopsis (e.g., Ceriporiopsis aneirina, Ceriporiopsis caregiea, Ceriporiopsis gilvescens, Ceriporiopsis pannocinta, Ceriporiopsis rivulosa, Ceriporiopsis subrufa, Ceriporiopsis subvermispora), Chrysosporium (e.g., Chrysosporium inops, Chrysosporium keratinophilum, Chrysosporium lucknowense, Chrysosporium merdarium, Chrysosporium pannicola, Chrysosporium queenslandicum, Chrysosporium tropicum, Chrysosporium zonatum), Coprinus (e.g., Coprinus cinereus), Coriolus (e.g., Coriolus hirsutus), Cryptococcus, Filibasidium, Fusarium (e.g., Fusarium bactridioides, Fusarium cerealis, Fusarium crookwellense, Fusarium culmorum, Fusarium graminearum, Fusarium graminum, Fusarium heterosporum, Fusarium negundi, Fusarium oxysporum, Fusarium reticulatum, Fusarium roseum, Fusarium sambucinum, Fusarium sarcochroum, Fusarium sporotrichioides, Fusarium sulphureum, Fusarium torulosum, Fusarium trichothecioides, Fusarium venenatum), Humicola (e.g., Humicola insolens, Humicola lanuginosa), Magnaporthe, Mucor (e.g., Mucor miehei), Myceliophthora (e.g., Myceliophthora thermophila), Neocallimastix, Neurospora (e.g., Neurospora crassa), Paecilomyces, Penicillium (e.g., Penicillium purpurogenum), Phanerochaete (e.g., Phanerochaete chrysosporium), Phlebia (e.g., Phlebia radiata), Piromyces, Pleurotus (e.g., Pleurotus eryngii), Schizophyllum, Talaromyces (e.g., Talaromyces emersonii), Thermoascus, Thielavia (e.g., Thielavia terrestris), Tolypocladium, Trametes (e.g., Trametes villosa, Trametes versicolor), or Trichoderma (e.g., Trichoderma harzianum, Trichoderma koningii, Trichoderma longibrachiatum, Trichoderma reesei, Trichoderma viride).

[1011] In some embodiments, the cell is a yeast cell, such as Candida, Hansenula, Kluyveromyces (e.g., Kluyveromyces lactis), Pichia, Saccharomyces (e.g., Saccharomyces carlsbergensis, Saccharomyces cerevisiae, Saccharomyces diastaticus, Saccharomyces douglasii, Saccharomyces kluyveri, Saccharomyces norbensis, Saccharomyces oviformis), Schizosaccharomyces, or Yarrowia (e.g., Yarrowia lipolytica).

[1012] The present disclosure also extends to methods of producing a protein of the present disclosure, comprising (a) cultivating a recombinant host cell of the present disclosure under conditions conducive for production of the protein; and optionally, (b) recovering the protein.

[1013] Cells are cultivated in a nutrient medium suitable for production of the protein using methods known in the art. For example, the cell may be cultivated by shake flask cultivation, or small-scale or large-scale fermentation (including continuous, batch, fed-batch, or solid-state, and/or microcarrier-based fermentations) in laboratory or industrial fermentors in a suitable medium and under conditions allowing the protein to be expressed and/or isolated. Suitable media are available from commercial suppliers or may be prepared according to published compositions (e.g., in catalogues of the American Type Culture Collection). If the protein is secreted into the nutrient medium, the protein can be recovered directly from the medium. If the protein is not secreted, it can be recovered from cell lysates.

[1014] The protein may be detected using methods known in the art that are specific for the protein, including, but not limited to, the use of specific antibodies, formation of an enzyme product, disappearance of an enzyme substrate, or an assay determining the relative or specific activity of the protein.

[1015] The protein may be recovered from the medium using methods known in the art, including, but not limited to, collection, centrifugation, filtration, extraction, spray-drying, evaporation, or precipitation. In one aspect, a whole fermentation broth comprising the protein is recovered. In another aspect, a cell-free fermentation broth comprising the protein is recovered.

[1016] The protein may be purified by a variety of procedures known in the art to obtain substantially pure proteins and/or protein fragments (see, e.g., Wingfield, 2015, Current Protocols in Protein Science; 80(1): 6.1.1-6.1.35; Labrou, 2014, Protein Downstream Processing, 1129: 3-10).

[1017] In an alternative aspect, the protein is not recovered.

[1018] Proteins of the present disclosure may be used to prevent and/or treat infestations/infections of/by horticultural pests at any time—including prior to planting, at the time of planting, after planting, prior to germination, after germination, prior to seedling emergence, at the time of seedling emergence, after seedling emergence, prior to the vegetative stage, during the vegetative stage, after the vegetative stage, prior to the reproductive stage, during the reproductive stage, after the reproductive stage, prior to flowering, at the time of flowering, after flowering, prior to fruiting, at the time of fruiting, after fruiting, prior to ripening, at the time of ripening, after ripening, prior to harvest, at the time of harvest, and after harvesting. Accordingly, proteins of the present disclosure may be formulated for use at any stage in the horticultural process and by any suitable method of application, including, but not limited to, on-seed application, in-furrow application, foliar application, preharvest application, and postharvest application.

[1019] Proteins of the present disclosure may be incorporated into formulations comprising any suitable carrier, including, but not limited to, seed-compatible carriers, soil-compatible carriers, foliar-compatible carriers, preharvest carriers, and postharvest carriers. Selection of appropriate carrier materials will depend on the intended application(s) and the protein(s) to be included in the formulation, as well as any other components that may be present in and/or added to the formulation. In some embodiments, the carrier is a liquid, a gel, a slurry, or a solid. In some embodiments, the carrier consists essentially of or consists of one or more protein-stabilizing compounds.

[1020] In some embodiments, formulations of the present disclosure comprise about/at least 0.001, 0.0015, 0.002, 0.0025, 0.003, 0.0035, 0.004, 0.0045, 0.005, 0.0055, 0.006, 0.0065, 0.007, 0.0075, 0.008, 0.0085, 0.009, 0.0095, 0.01, 0.015, 0.02, 0.025, 0.03, 0.035, 0.04, 0.045, 0.05, 0.055, 0.06, 0.065, 0.07, 0.075, 0.08, 0.085, 0.09, 0.095, 0.1, 0.15, 0.2, 0.25, 0.3, 0.35, 0.4, 0.45, 0.5, 0.55, 0.6, 0.65, 0.7, 0.75, 0.8, 0.85, 0.9, 0.95, 1, 1.1, 1.2, 1.3, 1.4, 1.5, 1.6, 1.7, 1.8, 1.9, 2, 2.1, 2.2, 2.3, 2.4, 2.5, 2.6, 2.7, 2.8, 2.9, 3, 3.1, 3.2, 3.3, 3.4, 3.5, 3.6, 3.7, 3.8, 3.9, 4, 4.1, 4.2, 4.3, 4.4, 4.5, 4.6, 4.7, 4.8, 4.9, 5, 5.1, 5.2, 5.3, 5.4, 5.5, 5.6, 5.7, 5.8, 5.9, 6, 6.1, 6.2, 6.3, 6.4, 6.5, 6.6, 6.7, 6.8, 6.9, 7, 7.1, 7.2, 7.3, 7.4, 7.5, 7.6, 7.7, 7.8, 7.9, 8, 8.1, 8.2, 8.3, 8.4, 8.5, 8.6, 8.7, 8.8, 8.9, 9, 9.1, 9.2, 9.3, 9.4, 9.5, 9.6, 9.7, 9.8, 9.9, 10, 11, 12, 13, 14, 15, 16, 17, 18, 19, 20, 21, 22, 23, 24, 25% or more protein (i.e., total amount of one or more proteins of the present disclosure) w/w, based upon the total weight of the formulation. For example, in some embodiments, formulations of the present disclosure comprise about/at least 0.001, 0.0015, 0.002, 0.0025, 0.003, 0.0035, 0.004, 0.0045, 0.005, 0.0055, 0.006, 0.0065, 0.007, 0.0075, 0.008, 0.0085, 0.009, 0.0095, 0.01, 0.015, 0.02, 0.025, 0.03, 0.035, 0.04, 0.045, 0.05, 0.055, 0.06, 0.065, 0.07, 0.075, 0.08, 0.085, 0.09, 0.095, 0.1, 0.15, 0.2, 0.25, 0.3, 0.35, 0.4, 0.45, 0.5, 0.55, 0.6, 0.65, 0.7, 0.75, 0.8, 0.85, 0.9, 0.95, 1, 1.1, 1.2, 1.3, 1.4, 1.5, 1.6, 1.7, 1.8, 1.9, 2, 2.1, 2.2, 2.3, 2.4, 2.5, 2.6, 2.7, 2.8, 2.9, 3, 3.1, 3.2, 3.3, 3.4, 3.5, 3.6, 3.7, 3.8, 3.9, 4, 4.1, 4.2, 4.3, 4.4, 4.5, 4.6, 4.7, 4.8, 4.9, 5, 5.1, 5.2, 5.3, 5.4, 5.5, 5.6, 5.7, 5.8, 5.9, 6, 6.1, 6.2, 6.3, 6.4, 6.5, 6.6, 6.7, 6.8, 6.9, 7, 7.1, 7.2, 7.3, 7.4, 7.5, 7.6, 7.7, 7.8, 7.9, 8, 8.1, 8.2, 8.3, 8.4, 8.5, 8.6, 8.7, 8.8, 8.9, 9, 9.1, 9.2, 9.3, 9.4, 9.5, 9.6, 9.7, 9.8, 9.9, 10, 11, 12, 13, 14, 15, 16, 17, 18, 19, 20, 21, 22, 23, 24, 25% w/w or more of one or more proteins selected from the group consisting of:
[1021] a) polypeptides having about/at least 60, 61, 62, 63, 64, 65, 66, 67, 68, 69, 70, 71, 72, 73, 74, 75, 76, 77, 78, 79, 80, 81, 82, 83, 84, 85, 86, 87, 88, 89, 90, 91, 92, 93, 94, 95, 96, 97, 98, 99 or 100% sequence identity to one or more of SEQ ID NOs: 1-48 and 98-150 or a mature polypeptide thereof;
[1022] b) polypeptides encoded by a polynucleotide having about/at least 60, 61, 62, 63, 64, 65, 66, 67, 68, 69, 70, 71, 72, 73, 74, 75, 76, 77, 78, 79, 80, 81, 82, 83, 84, 85, 86, 87, 88, 89, 90, 91, 92, 93, 94, 95, 96, 97, 98, 99 or 100% sequence identity to any one or more of SEQ ID NOs: 49-97 and 151-203 or the cDNA sequence thereof;
[1023] c) polypeptides derived from any one of SEQ ID NOs: 1-48 and 98-150 by substitution, deletion or insertion of one or more amino acids;
[1024] d) polypeptides derived from a mature polypeptide of any one of SEQ ID NOs: 1-48 and 98-150 by substitution, deletion or insertion of one or more amino acids;
[1025] e) polypeptides derived from any one of a) through d) above wherein the N- and/or C-terminal end has been extended by the addition of one or more amino acids;
[1026] f) fragments of any one of a) through e) above; and
[1027] g) enzymatically active fragments/mutants/variants of any one of SEQ ID NOs: 1-48 and 98-150 or mature polypeptides thereof.

[1028] In some embodiments, formulations of the present disclosure comprise about 0.0001 to about 40% protein (i.e., total amount of one or more proteins of the present disclosure) w/w, based upon the total weight of the formulation. For example, in some embodiments, formulations of the present disclosure comprise about 0.001, 0.0015, 0.002, 0.0025, 0.003, 0.0035, 0.004, 0.0045, 0.005, 0.0055, 0.006, 0.0065, 0.007, 0.0075, 0.008, 0.0085, 0.009, 0.0095, 0.01, 0.015, 0.02, 0.025, 0.03, 0.035, 0.04, 0.045, 0.05, 0.055, 0.06, 0.065, 0.07, 0.075, 0.08, 0.085, 0.09, 0.095, 0.1, 0.15, 0.2, 0.25, 0.3, 0.35, 0.4, 0.45, 0.5, 0.55, 0.6, 0.65, 0.7, 0.75, 0.8, 0.85, 0.9, 0.95, 1, 1.1, 1.2, 1.3, 1.4, 1.5, 1.6, 1.7, 1.8, 1.9, 2, 2.1, 2.2, 2.3, 2.4, 2.5, 2.6, 2.7, 2.8, 2.9, 3, 3.1, 3.2, 3.3, 3.4, 3.5, 3.6, 3.7, 3.8, 3.9, 4, 4.1, 4.2, 4.3, 4.4, 4.5, 4.6, 4.7, 4.8, 4.9 or 5% w/w to about 0.25, 0.3, 0.35, 0.4, 0.45, 0.5, 0.55, 0.6, 0.65, 0.7, 0.75, 0.8, 0.85, 0.9, 0.95, 1, 1.1, 1.2, 1.3, 1.4, 1.5, 1.6, 1.7, 1.8, 1.9, 2, 2.1, 2.2, 2.3, 2.4, 2.5, 2.6, 2.7, 2.8, 2.9, 3, 3.1, 3.2, 3.3, 3.4, 3.5, 3.6, 3.7, 3.8, 3.9, 4, 4.1, 4.2, 4.3, 4.4, 4.5, 4.6, 4.7, 4.8, 4.9, 5, 5.1, 5.2, 5.3, 5.4, 5.5, 5.6, 5.7, 5.8, 5.9, 6, 6.1, 6.2, 6.3, 6.4, 6.5, 6.6, 6.7, 6.8, 6.9, 7, 7.1, 7.2, 7.3, 7.4, 7.5, 7.6, 7.7, 7.8, 7.9, 8, 8.1, 8.2, 8.3, 8.4, 8.5, 8.6, 8.7, 8.8, 8.9, 9, 9.1, 9.2, 9.3, 9.4, 9.5, 9.6, 9.7, 9.8, 9.9, 10, 11, 12, 13, 14, 15, 16, 17, 18, 19, 20, 21, 22, 23, 24 or 25% w/w (e.g., about 0.0001 to about 1% w/w) of one or more pH control components selected from the group consisting of proteins selected from the group consisting of:
[1029] a) polypeptides having about/at least 60, 61, 62, 63, 64, 65, 66, 67, 68, 69, 70, 71, 72, 73, 74, 75, 76, 77, 78, 79, 80, 81, 82, 83, 84, 85, 86, 87, 88, 89, 90, 91, 92, 93, 94, 95, 96, 97, 98, 99 or 100% sequence identity to one or more of SEQ ID NOs: 1-48 and 98-150 or a mature polypeptide thereof;
[1030] b) polypeptides encoded by a polynucleotide having about/at least 60, 61, 62, 63, 64, 65, 66, 67, 68, 69, 70, 71, 72, 73, 74, 75, 76, 77, 78, 79, 80, 81, 82, 83, 84, 85, 86, 87, 88, 89, 90, 91, 92, 93, 94, 95, 96, 97, 98, 99 or 100% sequence identity to any one or more of SEQ ID NOs: 49-97 and 151-203 or the cDNA sequence thereof;
[1031] c) polypeptides derived from any one of SEQ ID NOs: 1-48 and 98-150 by substitution, deletion or insertion of one or more amino acids;
[1032] d) polypeptides derived from a mature polypeptide of any one of SEQ ID NOs: 1-48 and 98-150 by substitution, deletion or insertion of one or more amino acids;
[1033] e) polypeptides derived from any one of a) through d) above wherein the N- and/or C-terminal end has been extended by the addition of one or more amino acids;
[1034] f) fragments of any one of a) through e) above; and
[1035] g) enzymatically active fragments/mutants/variants of any one of SEQ ID NOs: 1-48 and 98-150 or mature polypeptides thereof.

[1036] The present disclosure extends to granules/particles comprising one or more proteins of the disclosure. In an embodiment, the granule comprises a core, and optionally one or more coatings (outer layers) surrounding the core.

[1037] The core may have a diameter, measured as equivalent spherical diameter (volume based average particle size), of 20-2000 μm, particularly 50-1500 μm, 100-1500 μm or 250-1200 μm. The core diameter, measured as equivalent spherical diameter, can be determined using laser diffraction, such as using a Malvern Mastersizer and/or the method described under ISO13320 (2020).

[1038] In an embodiment, the core comprises one or more proteins of the present disclosure.

[1039] The core may include additional materials such as fillers, fiber materials (cellulose or synthetic fibers), stabilizing agents, solubilizing agents, suspension agents, viscosity regulating agents, light spheres, plasticizers, salts, lubricants and fragrances.

[1040] The core may include a binder, such as synthetic polymer, wax, fat, or carbohydrate.

[1041] The core may include a salt of a multivalent cation, a reducing agent, an antioxidant, a peroxide decomposing catalyst and/or an acidic buffer component, typically as a homogenous blend.

[1042] The core may include an inert particle with the protein absorbed into it, or applied onto the surface, e.g., by fluid bed coating.

[1043] The core may have a diameter of 20-2000 μm, particularly 50-1500 μm, 100-1500 μm or 250-1200 μm.

[1044] The core may be surrounded by at least one coating, e.g., to improve the storage stability, to reduce dust formation during handling, or for coloring the granule. The optional coating(s) may include a salt coating, or other suitable coating materials, such as polyethylene glycol (PEG), methyl hydroxy-propyl cellulose (MHPC) and polyvinyl alcohol (PVA).

[1045] The coating may be applied in an amount of at least 0.1% by weight of the core, e.g., at least 0.5%, at least 1%, at least 5%, at least 10%, or at least 15%. The amount may be at most 100%, 70%, 50%, 40% or 30%.

[1046] The coating is preferably at least 0.1 μm thick, particularly at least 0.5 μm, at least 1 μm or at least 5 μm. In some embodiments, the thickness of the coating is below 100 μm, such as below 60 μm, or below 40 μm.

[1047] The coating should encapsulate the core unit by forming a substantially continuous layer. A substantially continuous layer is to be understood as a coating having few or no holes, so that the core unit has few or no uncoated areas.

[1048] The layer or coating should, in particular, be homogeneous in thickness.

[1049] The coating can further contain other materials as known in the art, e.g., fillers, antisticking agents, pigments, dyes, plasticizers and/or binders, such as titanium dioxide, kaolin, calcium carbonate or talc.

[1050] A salt coating may comprise at least 60% by weight of a salt, e.g., at least 65%, at least 70%, at least 75%, at least 80%, at least 85%, at least 90%, at least 95% or at least 99% by weight.

[1051] To provide acceptable protection, the salt coating is preferably at least 0.1 μm thick, e.g., at least 0.5 μm, at least 1 μm, at least 2 μm, at least 4 μm, at least 5 μm, or at least 8 μm. In a particular embodiment, the thickness of the salt coating is below 100 μm, such as below 60 μm, or below 40 μm.

[1052] The salt may be added from a salt solution where the salt is completely dissolved or from a salt suspension wherein the fine particles are less than 50 μm, such as less than 10 μm or less than 5 μm.

[1053] The salt coating may comprise a single salt or a mixture of two or more salts. The salt may be water soluble, in particular, having a solubility at least 0.1 g in 100 g of water at 20° C., preferably at least 0.5 g per 100 g water, e.g., at least 1 g per 100 g water, e.g., at least 5 g per 100 g water.

[1054] The salt may be an inorganic salt, e.g., salts of sulfate, sulfite, phosphate, phosphonate, nitrate, chloride or carbonate or salts of simple organic acids (less than 10 carbon atoms, e.g., 6 or less carbon atoms) such as citrate, malonate or acetate. Examples of cations in these salts are alkali or earth alkali metal ions, the ammonium ion or metal ions of the first transition series, such as sodium, potassium, magnesium, calcium, zinc or aluminum. Examples of anions include chloride, bromide, iodide, sulfate, sulfite, bisulfite, thiosulfate, phosphate, monobasic phosphate, dibasic phosphate, hypophosphite, dihydrogen pyrophosphate, tetraborate, borate, carbonate, bicarbonate, metasilicate, citrate, malate, maleate, malonate, succinate, lactate, formate, acetate, butyrate, propionate, benzoate, tartrate, ascorbate or gluconate. In particular, alkali- or earth alkali metal salts of sulfate, sulfite, phosphate, phosphonate, nitrate, chloride or carbonate or salts of simple organic acids such as citrate, malonate or acetate may be used.

[1055] The salt in the coating may have a constant humidity at 20° C. above 60%, particularly above 70%, above 80% or above 85%, or it may be another hydrate form of such a salt (e.g., anhydrate). The salt coating may be as described in WO 00/01793 or WO 2006/034710.

[1056] Specific examples of suitable salts are NaCl (CH_{20° C.}=76%), Na₂CO₃ (CH_{20° C.}=92%), NaNO₃ (CH_{20° C.}=73%), Na₂HPO₄ (CH_{20° C.}=95%), Na₃PO₄ (CH_{25° C.}=92%), NH₄Cl (CH_{20° C.}=79.5%), (NH₄)₂HPO₄(CH_{20° C.}=93.0%), NH₄H₂PO₄ (CH_{20° C.}=93.1%), (NH₄)₂SO₄ (CH_{20° C.}=81.1%), KCl (CH_{20° C.}=85%), K₂HPO₄(CH_{20° C.}=92%), KH₂PO₄ (CH_{20° C.}=96.5%), KNO₃ (CH_{20° C.}=93.5%), Na₂SO₄ (CH_{20° C.}=93%), K₂SO₄(CH_{20° C.}=98%), KHSO₄ (CH_{20° C.}=86%), MgSO₄ (CH_{20° C.}=90%), ZnSO₄ (CH_{20° C.}=90%) and sodium citrate (CH_{25° C.}=86%). Other examples include NaH₂PO₄, (NH₄)H₂PO₄, CuSO₄, Mg(NO₃)₂ and magnesium acetate.

[1057] The salt may be in anhydrous form, or it may be a hydrated salt, i.e., a crystalline salt hydrate with bound water(s) of crystallization, such as described in WO 99/32595. Specific examples include anhydrous sodium sulfate (Na₂SO₄), anhydrous magnesium sulfate (MgSO₄), magnesium sulfate heptahydrate (MgSO₄·7H₂O), zinc sulfate heptahydrate (ZnSO₄·7H₂O), sodium phosphate dibasic heptahydrate (Na₂HPO₄·7H₂O), magnesium nitrate hexahydrate (Mg(NO₃)₂(6H₂O)), sodium citrate dihydrate and magnesium acetate tetrahydrate.

[1058] Preferably the salt is applied as a solution of the salt, e.g., using a fluid bed.

[1059] The coating materials can be waxy coating materials and film-forming coating materials. Examples of waxy coating materials are poly(ethylene oxide) products (polyethyleneglycol, PEG) with mean molar weights of 1000 to 20000; ethoxylated nonylphenols having from 16 to 50 ethylene oxide units; ethoxylated fatty alcohols in which the alcohol contains from 12 to 20 carbon atoms and in which there are 15 to 80 ethylene oxide units; fatty alcohols; fatty acids; and mono- and di- and triglycerides of fatty acids. Examples of film-forming coating materials suitable for application by fluid bed techniques are given in GB 1483591.

[1060] The granule may optionally have one or more additional coatings. Examples of suitable coating materials are polyethylene glycol (PEG), methyl hydroxy-propyl cellulose (MHPC) and polyvinyl alcohol (PVA). Examples of enzyme granules with multiple coatings are described in WO 93/07263 and WO 97/23606.

[1061] The core can be prepared by granulating a blend of the ingredients, e.g., by a method comprising granulation techniques such as crystallization, precipitation, pan-coating, fluid bed coating, fluid bed agglomeration, rotary atomization, extrusion, prilling, spheronization, size reduction methods, drum granulation, and/or high shear granulation.

[1062] Methods for preparing the core can be found in the Handbook of Powder Technology; Particle size enlargement by C. E. Capes; Vol. 1; 1980; Elsevier. Preparation methods include known feed and granule formulation technologies, e.g.,
[1063] (a) Spray dried products, wherein a liquid protein-containing solution is atomized in a spray drying tower to form small droplets which during their way down the drying tower dry to form a protein-containing particulate material. Very small particles can be produced this way (Michael S. Showell (editor); Powdered detergents; Surfactant Science Series; 1998; Vol. 71; pages 140-142; Marcel Dekker).
[1064] (b) Layered products, wherein the protein is coated as a layer around a pre-formed inert core particle, wherein a protein-containing solution is atomized, typically in a fluid bed apparatus wherein the pre-formed core particles are fluidized, and the protein-containing solution adheres to the core particles and dries up to leave a layer of dry protein on the surface of the core particle. Particles of a desired size can be obtained this way if a useful core particle of the desired size can be found. This type of product is described in, e.g., WO 97/23606.
[1065] (c) Absorbed core particles, wherein rather than coating the protein as a layer around the core, the protein is absorbed onto and/or into the surface of the core. Such a process is described in WO 97/39116.
[1066] (d) Extrusion or pelletized products, wherein a protein-containing paste is pressed to pellets or under pressure is extruded through a small opening and cut into particles which are subsequently dried. Such particles usually have a considerable size because of the material in which the extrusion opening is made (usually a plate with bore holes) sets a limit on the allowable pressure drop over the extrusion opening. Also, very high extrusion pressures when using a small opening increase heat generation in the protein paste, which is harmful to the protein (Michael S. Showell (editor); Powdered detergents; Surfactant Science Series; 1998; Vol. 71; pages 140-142; Marcel Dekker).
[1067] (e) Prilled products, wherein a protein-containing powder is suspended in molten wax and the suspension is sprayed, e.g., through a rotating disk atomizer, into a cooling chamber where the droplets quickly solidify (Michael S. Showell (editor); Powdered detergents; Surfactant Science Series; 1998; Vol. 71; pages 140-142; Marcel Dekker). The product obtained is one wherein the protein is uniformly distributed throughout an inert material instead of being concentrated on its surface. U.S. Pat. Nos. 4,016,040 and 4,713,245 describe this technique.
[1068] (f) Mixer granulation products, wherein a protein-containing liquid is added to a dry powder composition of conventional granulating components. The liquid and the powder in a suitable proportion are mixed and as the moisture of the liquid is absorbed in the dry powder, the components of the dry powder will start to adhere and agglomerate and particles will build up, forming granulates comprising the protein. Such a process is described in U.S. Pat. No. 4,106,991, EP 170360, EP 304332, EP 304331, WO 90/09440 and WO 90/09428. Ina particular aspect of this process, various high-shear mixers can be used as granulators. Granulates consisting of protein, fillers and binders etc. are mixed with cellulose fibers to reinforce the particles to produce a so-called T-granulate. Reinforced particles, are more robust, and release less enzymatic dust.
[1069] (g) Size reduction, wherein the cores are produced by milling or crushing of larger particles, pellets, tablets, briquettes etc. containing the protein. The wanted core particle fraction is obtained by sieving the milled or crushed product. Over and undersized particles can be recycled. Size reduction is described in Martin Rhodes (editor); Principles of Powder Technology; 1990; Chapter 10; John Wiley & Sons.
[1070] (h) Fluid bed granulation. Fluid bed granulation involves suspending particulates in an air stream and spraying a liquid onto the fluidized particles via nozzles. Particles hit by spray droplets get wetted and become tacky. The tacky particles collide with other particles and adhere to them to form a granule.
[1071] (i) The cores may be subjected to drying, such as in a fluid bed drier. Other known methods for drying granules in the feed or enzyme industry can be used by the skilled person. The drying preferably takes place at a product temperature of from 25 to 90° C. For some proteins, it is important the cores comprising the protein contain a low amount of water before coating with the salt. If water sensitive proteins are coated with a salt before excessive water is removed, the excessive water will be trapped within the core and may affect the activity of the protein negatively. After drying, the cores preferably contain 0.1-10% w/w water.

[1072] Non-dusting granulates may be produced, e.g., as disclosed in U.S. Pat. Nos. 4,106,991 and 4,661,452 and may optionally be coated by methods known in the art.

[1073] The granulate may further comprise one or more additional enzymes, e.g., hydrolase, isomerase, ligase, lyase, oxidoreductase, and transferase. The one or more additional enzymes are preferably selected from the group consisting of acetylxylan esterase, acylglycerol lipase, amylase, alpha-amylase, beta-amylase, arabinofuranosidase, cellobiohydrolases, cellulase, feruloyl esterase, galactanase, alpha-galactosidase, beta-galactosidase, beta-glucanase, beta-glucosidase, lysophospholipase, lysozyme, alpha-mannosidase, beta-mannosidase (mannanase), phytase, phospholipase A1, phospholipase A2, phospholipase D, protease, pullulanase, pectin esterase, triacylglycerol lipase, xylanase, beta-xylosidase or any combination thereof. Each enzyme will then be present in more granules securing a more uniform distribution of the enzymes, and also reduces the physical segregation of different enzymes due to different particle sizes. Methods for producing multi-enzyme co-granulates is disclosed in the ip.com disclosure IPCOM000200739D. Another example of formulation of proteins using co-granulates is disclosed in WO 2013/188331.

[1074] The present disclosure also relates to protected proteins prepared according to the method(s) disclosed in EP 238216.

[1075] The present disclosure also extends to liquid formulations comprising one or more proteins of the disclosure. In some embodiments, the formulation comprises one or more enzyme stabilizers, one or more pH control components, one or more rain fasteners, and, optionally, one or more preservatives.

[1076] Formulations of the present disclosure may comprise any suitable enzyme stabilizer(s), including, but not limited to, sugars (e.g., monosaccharides, such as fructose, galactose and glucose; disaccharides, such as lactose, maltose and sucrose; oligosaccharides, such as maltodextrins; and polysaccharides, such as celluloses and starches), polyols (e.g., sugar alcohols, such as arabitol, erythritol, ethylene glycol, glycerol, mannitol, sorbitol and xylitol; and polymeric polyols, such as polyethylene glycols and polypropylene glycols), polyvinyl alcohols, lactic acid, lactic acid derivatives, boric acids, boric acid derivatives (e.g., aromatic borate esters and phenyl boronic acid derivatives, such as 4-formylphenyl boronic acid), and reversible protease inhibitors. See generally, e.g., WO 2007/113241; WO 01/04279; WO 2013/004636; WO 95/02046; WO 2009/118375; WO 2020/115179; WO 96/41859; WO 2007/025549; WO 96/23062; WO 2018/130654; WO 96/22366; WO 92/17571; WO 2017/044473; WO 2017/044545, WO 2017/116837, WO 2017/116846, WO 2017/210163, WO 2017/210166, WO 2018/118740, WO 2018/175681, WO 2018/183491, WO 2018/218008, WO 2018/218016; WO 2018/218035. It is to be understood that certain enzyme stabilizers may impart other beneficial properties to formulations of the present disclosure, such as enhanced flowability and/or improved adhesion to a plant surface.

[1077] In some embodiments, formulations of the present disclosure comprise about/at least 5, 10, 15, 20, 25, 30, 35, 40, 45, 50, 55, 60, 65, 70, 75, 80, 85, 90, 95% or more polyol (i.e., total amount of one or more polyols) w/w, based upon the total weight of the formulation. For example, in some embodiments, formulations of the present disclosure comprise about/at least 5, 10, 15, 20, 25, 30, 35, 40, 45, 50, 55, 60, 65, 70, 75, 80, 85, 90, 95% w/w or more of one or more polyols selected from the group consisting of glycerol, sorbitol, propylene glycol (MPG), ethylene glycol, diethylene glycol, triethylene glycol, 1,2-propylene glycol or 1,3-propylene glycol, dipropylene glycol, polyethylene glycols (PEG) having an average molecular weight below about 600, and polypropylene glycols (PPG) having an average molecular weight below about 600, preferably glycerol, sorbitol and/or propylene glycol (MPG).

[1078] In some embodiments, formulations of the present disclosure comprise about 5 to about 95% polyol (i.e., total amount of one or more polyols) w/w, based upon the total weight of the formulation. For example, in some embodiments, formulations of the present disclosure comprise about 5, 10, 15, 20, 25, 30, 40, 45 or 50% w/w to about 50, 55, 60, 65, 70, 75, 80, 85, 90 or 95% w/w (e.g., about 20 to about 40% w/w) of one or more polyols selected from the group consisting of glycerol, sorbitol, propylene glycol (MPG), ethylene glycol, diethylene glycol, triethylene glycol, 1,2-propylene glycol or 1,3-propylene glycol, dipropylene glycol, polyethylene glycols (PEG) having an average molecular weight below about 600, and polypropylene glycols (PPG) having an average molecular weight below about 600, preferably glycerol, sorbitol and/or propylene glycol (MPG).

[1079] Formulations of the present disclosure may comprise any suitable pH control component(s), including, but not limited to, acetate, carbonate, citrate, phosphate and other salts capable of buffering the formulation at a desired pH and having an aqueous solubility of more than 1% w/w. Preferred pH control components in some embodiments are phosphate buffers containing the ionic species HPO₄²⁻ and H₂PO₄⁻.

[1080] A pH control component may be a single ionic species, that can maintain a constant pH but only provide a buffering effect towards either acidification or basification. An example of such, is HPO₄²⁻ which can ensure an alkaline pH (of approximately 9) and provide a buffering effect against acidification. This may be beneficial in an agricultural setting to keep the pH constant at an alkaline pH, as most environmental factors will cause acidification of a droplet and deposit.

[1081] In preferred embodiments, the pH control component does not significantly change pH (+/−0.5 pH units) or change in a desired direction upon drying when the solvent evaporates from a droplet on a plant surface. Some buffers will, upon drying, change pH as a result of differences in solubility of the buffer components. As an example, the pH of a sodium phosphate buffer constituting of Na₂HPO₄ and NaH₂PO₄ can reduce to pH 4 or lower upon drying since the dibasic form (Na₂HPO₄) will crystallize to a larger degree. On the contrary, the pH of a potassium phosphate buffer constituting of K₂HPO₄ and KH₂PO₄ will approach pH 9 upon drying since the monobasic form (KH₂PO₄) has the lowest solubility (Sarciaux 1999).

[1082] A pH control component is most effective (highest buffer capacity) when the pKa is close to the desired pH of the composition. This will reduce the amount of buffer needed to maintain a desired pH. In an embodiment, the buffer includes salts having a neutral/alkaline pKa, such as a pKa in the range of 6.5 to 10.

[1083] As a rule of thumb, a pH control component can be used to control the pH of a solution at a pH+/−1 pH-unit from its pKa value. For example, pH control components with a pKa value above 6.5 are useful for controlling the pH at 7.5 or above. Examples of suitable pH control components include, but are not limited to sodium or potassium phosphate (pKa₁ 2.12, pKa₂ 7.21, pKa₃ 12.67), sodium or potassium carbonate (pKa₁ 6.37, pKa₂ 10.32), 2-amino-2-(hydroxymethyl)-1,3-propanediol (TRIS) (pKa 8.1), [Bis(2-hydroxyethyl)amino]acetic acid (Bicine) (pKa 8.35), N-[tris(hydroxymethyl)methyl]glycine (Tricine) (pKa 8.15), 4-(2-hydroxyethyl)-1-piperazineethanesulfonic acid (HEPES) (pKa₁ 3.0, pKa₂ 7.5), N-[tris(hydroxymethyl)methyl]-2-aminoethanesulfonic acid (TES) (pKa 7.55), 3-(N-morpholino)propanesulfonic acid (MOPS) (pKa 7.2), tris(hydroxymethyl)methylamino]propanesulfonic acid (TAPS) (pKa 8.44), N-[tris(hydroxymethyl)methyl]-3-amino-2-hydroxypropanesulfonic acid (TAPSO) (pKa 7.6), glycylglycine (pKa₁ 3.14 pKa₂ 8.17), 2-(N-cyclohexylamino)ethanesulfonic acid (CHES) (pKa 9.3), sodium or potassium borate (pKa₁ 9.24, pKa₂ 12.4, pKa₃ 13.3), 2-amino-2-methyl-1,3-propanediol (ammediol) (pKa 8.8), triethanol amine (pKa 7.74), 2-amino-2-methyl-1-propanol (pKa 9.7), glycine (pKa₁ 2.34, pKa₂ 9.6), histidine (pKa₁ 1.82, pKa₂ 6.00, pKa₃ 9.17), and other amino acid buffers.

[1084] Non-preferred pH control components include, but are not limited to, pH control components with an unfavorable pKa (e.g., pKa<6.5 for an enzyme that requires an alkaline pH or pKa>7.5 for an enzyme that requires an acidic pH), volatile pH control component, pH control component that display significant phytotoxicity (this may sometimes include the above-mentioned “suitable” pH control components, as phytotoxicity is depended on buffer concentration, pH and target crop), and pH control components that are unwanted in the environment and therefore regulated by authorities (this may sometimes include the above-mentioned “suitable” pH control component, as regulations vary throughout the world).

[1085] In some embodiments, pH control components may be used to provide formulations of the present disclosure that maintain an alkaline pH. For example, in some preferred embodiments, formulations of the present disclosure comprise one or more pH control components selected to provide a composition having an alkaline pH, preferably at least 7.5, more preferably between 7.5 and 10, most preferably between 8 and 9.5. Thus, in some embodiments, formulations of the present disclosure comprise a pH control component, such as a buffer, where an 1% w/w aqueous solution of the pH control component (buffer) has an alkaline pH (e.g., above 7.5, preferably above 8, and below 10, preferably below 9.5).

[1086] In some embodiments, pH control components may be used to provide formulations of the present disclosure that maintain a neutral pH. For example, in some preferred embodiments, formulations of the present disclosure comprise one or more pH control components selected to provide a composition having a neutral pH, preferably between 6.5 and 7.5, more preferably between 6.75 and 7.25, most preferably about 7. Thus, in some embodiments, formulations of the present disclosure comprise a pH control component, such as a buffer, where an 1% w/w aqueous solution of the pH control component (buffer) has a neutral pH (e.g., above 6.5 and below 7.5, preferably above 6.75 and below 7.25, more preferably about 7).

[1087] In some embodiments, pH control components may be used to provide formulations of the present disclosure that maintain an acidic pH. For example, in some preferred embodiments, formulations of the present disclosure comprise one or more pH control components selected to provide a composition having an acidic pH, preferably below 6.5, more preferably between 4 and 6.5, most preferably between 4.5 and 6. Thus, in some embodiments, formulations of the present disclosure comprise a pH control component, such as a buffer, where an 1% w/w aqueous solution of the pH control component (buffer) has an acidic pH (e.g., below 6.5, preferably below 6, and above 4, preferably above 4.5).

[1088] In some embodiments, formulations of the present disclosure comprise about/at least 0.001, 0.0015, 0.002, 0.0025, 0.003, 0.0035, 0.004, 0.0045, 0.005, 0.0055, 0.006, 0.0065, 0.007, 0.0075, 0.008, 0.0085, 0.009, 0.0095, 0.01, 0.015, 0.02, 0.025, 0.03, 0.035, 0.04, 0.045, 0.05, 0.055, 0.06, 0.065, 0.07, 0.075, 0.08, 0.085, 0.09, 0.095, 0.1, 0.15, 0.2, 0.25, 0.3, 0.35, 0.4, 0.45, 0.5, 0.55, 0.6, 0.65, 0.7, 0.75, 0.8, 0.85, 0.9, 0.95, 1, 1.1, 1.2, 1.3, 1.4, 1.5, 1.6, 1.7, 1.8, 1.9, 2, 2.1, 2.2, 2.3, 2.4, 2.5, 2.6, 2.7, 2.8, 2.9, 3, 3.1, 3.2, 3.3, 3.4, 3.5, 3.6, 3.7, 3.8, 3.9, 4, 4.1, 4.2, 4.3, 4.4, 4.5, 4.6, 4.7, 4.8, 4.9, 5% or more pH control component (i.e., total amount of one or more pH control components) w/w, based upon the total weight of the formulation. For example, in some embodiments, formulations of the present disclosure comprise about/at least 0.001, 0.0015, 0.002, 0.0025, 0.003, 0.0035, 0.004, 0.0045, 0.005, 0.0055, 0.006, 0.0065, 0.007, 0.0075, 0.008, 0.0085, 0.009, 0.0095, 0.01, 0.015, 0.02, 0.025, 0.03, 0.035, 0.04, 0.045, 0.05, 0.055, 0.06, 0.065, 0.07, 0.075, 0.08, 0.085, 0.09, 0.095, 0.1, 0.15, 0.2, 0.25, 0.3, 0.35, 0.4, 0.45, 0.5, 0.55, 0.6, 0.65, 0.7, 0.75, 0.8, 0.85, 0.9, 0.95, 1, 1.1, 1.2, 1.3, 1.4, 1.5, 1.6, 1.7, 1.8, 1.9, 2, 2.1, 2.2, 2.3, 2.4, 2.5, 2.6, 2.7, 2.8, 2.9, 3, 3.1, 3.2, 3.3, 3.4, 3.5, 3.6, 3.7, 3.8, 3.9, 4, 4.1, 4.2, 4.3, 4.4, 4.5, 4.6, 4.7, 4.8, 4.9, 5% w/w or more of one or more pH control components selected from the group consisting of acetate, citrate, carbonate and phosphate buffers, preferably sodium acetate, sodium citrate, sodium carbonate and/or potassium phosphate buffers.

[1089] In some embodiments, formulations of the present disclosure comprise about 0.001 to about 10% pH control component (i.e., total of one or more pH control components) w/w, based upon the total weight of the formulation. For example, in some embodiments, formulations of the present disclosure comprise about 0.001, 0.0015, 0.002, 0.0025, 0.003, 0.0035, 0.004, 0.0045, 0.005, 0.0055, 0.006, 0.0065, 0.007, 0.0075, 0.008, 0.0085, 0.009, 0.0095, 0.01, 0.015, 0.02, 0.025, 0.03, 0.035, 0.04, 0.045, 0.05, 0.055, 0.06, 0.065, 0.07, 0.075, 0.08, 0.085, 0.09, 0.095, 0.1, 0.15, 0.2, 0.25, 0.3, 0.35, 0.4, 0.45, 0.5, 0.55, 0.6, 0.65, 0.7, 0.75, 0.8, 0.85, 0.9, 0.95 or 1% w/w to about 0.25, 0.3, 0.35, 0.4, 0.45, 0.5, 0.55, 0.6, 0.65, 0.7, 0.75, 0.8, 0.85, 0.9, 0.95, 1, 1.1, 1.2, 1.3, 1.4, 1.5, 1.6, 1.7, 1.8, 1.9, 2, 2.1, 2.2, 2.3, 2.4, 2.5, 2.6, 2.7, 2.8, 2.9, 3, 3.1, 3.2, 3.3, 3.4, 3.5, 3.6, 3.7, 3.8, 3.9, 4, 4.1, 4.2, 4.3, 4.4, 4.5, 4.6, 4.7, 4.8, 4.9 or 5% w/w (e.g., about 0.01 to about 1% w/w) of one or more pH control components selected from the group consisting of acetate, carbonate, citrate and phosphate buffers, preferably sodium acetate, sodium carbonate, sodium citrate and/or potassium phosphate buffers.

[1090] Formulations of the present disclosure may comprise any suitable rain fastener(s), including, but not limited to, organo-modified siloxanes (organosiloxanes), such as organo-modified trisiloxanes (e.g., polyether-modified trisiloxanes, such as polyalkyleneoxide-modified heptamethyltrisiloxane) and organo-modified polysiloxanes (e.g., polyether-modified polysiloxanes,). See generally, e.g., EPO 0245970; U.S. Pat. No. 5,496,568; WO 2008/144024; WO 2009/135049; WO 2011/126832; WO 2017/083049; WO 2020/225276; WO 2021/055316; WO 2022/096688; WO 2022/096691; WO 2022/096692; WO 2022/096693; WO 2022/096694; WO/2022/096695; WO 2022/096696.

[1091] In some embodiments, formulations of the present disclosure comprise one or more organo-modified siloxanes having the general molecular structure of Formula 1:

[chemical structure]

[1092] in which
[1093] R¹ represents identical or different from each other hydrocarbon substituents of 1-10 carbons or hydrogen, preferred are methyl, ethyl, propyl and phenyl substituents, particularly preferred are methyl substituents;
[1094] R² represents identical or different from each other polyether substituents of the general Formula II:

[chemical structure]

[1095] wherein
[1096] R³ represents identical or different from each other hydrocarbon moieties of 1-8 carbons, which optionally is interrupted by oxygen atoms. Preferred is linear hydrocarbons of 2-4 carbons, particularly preferred is —CH₂—CH₂—CH₂—
[1097] R⁴ represents identical or different from each other hydrocarbon substituents of 1-12 carbons or hydrogen, preferred is methyl, ethyl, phenyl or hydrogen substituents
[1098] R⁵ represents identical or different from each other hydrocarbon substituents of 1-16 carbons, which optionally contains urethane, carbonyl or carboxylic acid functionality, or hydrogen.

[1099] Methyl or hydrogen substituents are preferred, with hydrogen being most preferred. A is 0-200, preferably 0-1, more preferably 0. B is 0-200, preferably 0.5-2, more preferably 1. In preferred embodiments, A+B>0. C is 0-60, preferably 1-15. D is 0-60, preferably 0-10. E is 0-20, preferably 0-10, more preferably 0. In preferred embodiments, C+D+E>0.

[1100] A trisiloxane may be defined as a molecule of the general Formula I with A=0 and B=1, whereas a polysiloxane is a molecule of the general formula I with A+B>1 and A>1.

[1101] Examples of commercially available organo-modified siloxanes include, but are not limited to BIOSPREAD® surfactants (Grosafe Chemicals Ltd., New Zealand); BREAK-THRU® surfactants (Evonik Operations Gmbh, Essen, Germany), such as BREAK-THRU® AF 5503, BREAK-THRU® AF 9902, BREAK-THRU® AF 9903, BREAK-THRU® OE 440, BREAK-THRU® OE 444, BREAK-THRU® OE 446, BREAK-THRU® S 200, BREAK-THRU® S 233, BREAK-THRU® S 240, BREAK-THRU® S 255, BREAK-THRU® S 279, BREAK-THRU® S 301, BREAK-THRU® SD 260, and BREAK-THRU® UNION; BYK® surfactants (BYK-Chemie GmbH, Wesel, Germany), such as BYK®-348; ECOSPREAD® surfactants (Grosafe Chemicals Ltd., New Zealand); HI-WETT® surfactants (Loveland Products, Inc., Greeley, CO, USA); and SILWET™ surfactants (Momentive, Inc., Waterford, NY, USA), such as SILWET™ L-77, SILWET™ HS-312, SILWET™ 408, SILWET™ 618, SILWET™ 625, SILWET™ 636, SILWET™ 641, SILWET™ 806, SILWET™ DA-40, SILWET™ DRS-60, SILWET™ ECO, SILWET™ FUSION, SILWET™ HS 312, SILWET™ HS 604, SILWET™ HSEC, SILWET™ LF, SILWET™ OC, and SILWET™ STIK 2.

[1102] In some embodiments, formulations of the present disclosure comprise about/at least 0.001, 0.0015, 0.002, 0.0025, 0.003, 0.0035, 0.004, 0.0045, 0.005, 0.0055, 0.006, 0.0065, 0.007, 0.0075, 0.008, 0.0085, 0.009, 0.0095, 0.01, 0.015, 0.02, 0.025, 0.03, 0.035, 0.04, 0.045, 0.05, 0.055, 0.06, 0.065, 0.07, 0.075, 0.08, 0.085, 0.09, 0.095, 0.1, 0.15, 0.2, 0.25, 0.3, 0.35, 0.4, 0.45, 0.5, 0.55, 0.6, 0.65, 0.7, 0.75, 0.8, 0.85, 0.9, 0.95, 1, 1.1, 1.2, 1.3, 1.4, 1.5, 1.6, 1.7, 1.8, 1.9, 2, 2.1, 2.2, 2.3, 2.4, 2.5, 2.6, 2.7, 2.8, 2.9, 3, 3.1, 3.2, 3.3, 3.4, 3.5, 3.6, 3.7, 3.8, 3.9, 4, 4.1, 4.2, 4.3, 4.4, 4.5, 4.6, 4.7, 4.8, 4.9, 5, 6, 7, 8, 9, 10, 11, 12, 13, 14, 15, 16, 17, 18, 19, 20, 21, 22, 23, 24, 25, 30, 35, 40, 45, 50% or more rain fastener (i.e., total amount of one or more rain fasteners) w/w, based upon the total weight of the formulation. For example, in some embodiments, formulations of the present disclosure comprise about/at least 0.001, 0.0015, 0.002, 0.0025, 0.003, 0.0035, 0.004, 0.0045, 0.005, 0.0055, 0.006, 0.0065, 0.007, 0.0075, 0.008, 0.0085, 0.009, 0.0095, 0.01, 0.015, 0.02, 0.025, 0.03, 0.035, 0.04, 0.045, 0.05, 0.055, 0.06, 0.065, 0.07, 0.075, 0.08, 0.085, 0.09, 0.095, 0.1, 0.15, 0.2, 0.25, 0.3, 0.35, 0.4, 0.45, 0.5, 0.55, 0.6, 0.65, 0.7, 0.75, 0.8, 0.85, 0.9, 0.95, 1, 1.1, 1.2, 1.3, 1.4, 1.5, 1.6, 1.7, 1.8, 1.9, 2, 2.1, 2.2, 2.3, 2.4, 2.5, 2.6, 2.7, 2.8, 2.9, 3, 3.1, 3.2, 3.3, 3.4, 3.5, 3.6, 3.7, 3.8, 3.9, 4, 4.1, 4.2, 4.3, 4.4, 4.5, 4.6, 4.7, 4.8, 4.9, 5, 6, 7, 8, 9, 10% w/w or more of one or more rain fasteners selected from the group consisting of organo-modified siloxanes, preferably organo-modified trisiloxanes and organo-modified polysiloxanes, more preferably organo-modified trisiloxanes and polysiloxanes comprising one or more polyether groups, most preferably trisiloxane (poly)ethoxylates and polysiloxane (poly)ethoxylates.

[1103] In some embodiments, formulations of the present disclosure comprise about 0.001 to about 50% rain fastener (i.e., total amount of one or more rain fasteners) w/w, based upon the total weight of the formulation. For example, in some embodiments, formulations of the present disclosure comprise about/at least 0.001, 0.0015, 0.002, 0.0025, 0.003, 0.0035, 0.004, 0.0045, 0.005, 0.0055, 0.006, 0.0065, 0.007, 0.0075, 0.008, 0.0085, 0.009, 0.0095, 0.01, 0.015, 0.02, 0.025, 0.03, 0.035, 0.04, 0.045, 0.05, 0.055, 0.06, 0.065, 0.07, 0.075, 0.08, 0.085, 0.09, 0.095, 0.1, 0.15, 0.2, 0.25, 0.3, 0.35, 0.4, 0.45, 0.5, 0.55, 0.6, 0.65, 0.7, 0.75, 0.8, 0.85, 0.9, 0.95 or 1% w/w to about 0.5, 0.55, 0.6, 0.65, 0.7, 0.75, 0.8, 0.85, 0.9, 0.95, 1, 1.1, 1.2, 1.3, 1.4, 1.5, 1.6, 1.7, 1.8, 1.9, 2, 2.1, 2.2, 2.3, 2.4, 2.5, 2.6, 2.7, 2.8, 2.9, 3, 3.1, 3.2, 3.3, 3.4, 3.5, 3.6, 3.7, 3.8, 3.9, 4, 4.1, 4.2, 4.3, 4.4, 4.5, 4.6, 4.7, 4.8, 4.9, 5, 6, 7, 8, 9 or 10% w/w of one or more rain fasteners selected from the group consisting of organo-modified siloxanes, preferably organo-modified trisiloxanes and organo-modified polysiloxanes, more preferably organo-modified trisiloxanes and polysiloxanes comprising one or more polyether groups, most preferably trisiloxane (poly)ethoxylates and polysiloxane (poly)ethoxylates.

[1104] Formulations of the present disclosure may comprise any suitable preservative(s), including, but not limited to, potassium benzoate, potassium sorbate, sodium benzoate and sodium sorbate.

[1105] In some embodiments, formulations of the present disclosure comprise about/at least 0.001, 0.0015, 0.002, 0.0025, 0.003, 0.0035, 0.004, 0.0045, 0.005, 0.0055, 0.006, 0.0065, 0.007, 0.0075, 0.008, 0.0085, 0.009, 0.0095, 0.01, 0.015, 0.02, 0.025, 0.03, 0.035, 0.04, 0.045, 0.05, 0.055, 0.06, 0.065, 0.07, 0.075, 0.08, 0.085, 0.09, 0.095, 0.1, 0.15, 0.2, 0.25, 0.3, 0.35, 0.4, 0.45, 0.5, 0.55, 0.6, 0.65, 0.7, 0.75, 0.8, 0.85, 0.9, 0.95, 1, 1.1, 1.2, 1.3, 1.4, 1.5, 1.6, 1.7, 1.8, 1.9, 2, 2.1, 2.2, 2.3, 2.4, 2.5, 2.6, 2.7, 2.8, 2.9, 3, 3.1, 3.2, 3.3, 3.4, 3.5, 3.6, 3.7, 3.8, 3.9, 4, 4.1, 4.2, 4.3, 4.4, 4.5, 4.6, 4.7, 4.8, 4.9, 5, 6, 7, 8, 9, 10% or more preservative (i.e., total amount of one or more preservatives) w/w, based upon the total weight of the formulation. For example, in some embodiments, formulations of the present disclosure comprise about/at least 0.001, 0.0015, 0.002, 0.0025, 0.003, 0.0035, 0.004, 0.0045, 0.005, 0.0055, 0.006, 0.0065, 0.007, 0.0075, 0.008, 0.0085, 0.009, 0.0095, 0.01, 0.015, 0.02, 0.025, 0.03, 0.035, 0.04, 0.045, 0.05, 0.055, 0.06, 0.065, 0.07, 0.075, 0.08, 0.085, 0.09, 0.095, 0.1, 0.15, 0.2, 0.25, 0.3, 0.35, 0.4, 0.45, 0.5, 0.55, 0.6, 0.65, 0.7, 0.75, 0.8, 0.85, 0.9, 0.95, 1, 1.1, 1.2, 1.3, 1.4, 1.5, 1.6, 1.7, 1.8, 1.9, 2, 2.1, 2.2, 2.3, 2.4, 2.5, 2.6, 2.7, 2.8, 2.9, 3, 3.1, 3.2, 3.3, 3.4, 3.5, 3.6, 3.7, 3.8, 3.9, 4, 4.1, 4.2, 4.3, 4.4, 4.5, 4.6, 4.7, 4.8, 4.9, 5% w/w or more of one or more preservatives selected from the group consisting of potassium benzoate, potassium sorbate, sodium benzoate and sodium sorbate, preferably potassium sorbate and/or sodium benzoate.

[1106] In some embodiments, formulations of the present disclosure comprise about 0.001 to about 10% preservative (i.e., total amount of one or more preservatives) w/w, based upon the total weight of the formulation. For example, in some embodiments, formulations of the present disclosure comprise about 0.001, 0.0015, 0.002, 0.0025, 0.003, 0.0035, 0.004, 0.0045, 0.005, 0.0055, 0.006, 0.0065, 0.007, 0.0075, 0.008, 0.0085, 0.009, 0.0095, 0.01, 0.015, 0.02, 0.025, 0.03, 0.035, 0.04, 0.045, 0.05, 0.055, 0.06, 0.065, 0.07, 0.075, 0.08, 0.085, 0.09, 0.095, 0.1, 0.15, 0.2, 0.25, 0.3, 0.35, 0.4, 0.45, 0.5, 0.55, 0.6, 0.65, 0.7, 0.75, 0.8, 0.85, 0.9, 0.95 or 1% w/w to about 0.5, 0.55, 0.6, 0.65, 0.7, 0.75, 0.8, 0.85, 0.9, 0.95, 1, 1.1, 1.2, 1.3, 1.4, 1.5, 1.6, 1.7, 1.8, 1.9, 2, 2.1, 2.2, 2.3, 2.4, 2.5, 2.6, 2.7, 2.8, 2.9, 3, 3.1, 3.2, 3.3, 3.4, 3.5, 3.6, 3.7, 3.8, 3.9, 4, 4.1, 4.2, 4.3, 4.4, 4.5, 4.6, 4.7, 4.8, 4.9 or 5% w/w of one or more preservatives selected from the group consisting of potassium benzoate, potassium sorbate, sodium benzoate and sodium sorbate, preferably potassium sorbate and/or sodium benzoate.

[1107] Proteins of the present disclosure may be incorporated into formulations comprising myriad components, including, but not limited to, adhesives (stickers), chemical actives, dispersants (spreaders), drying agents, emulsifiers, microbes, nutrients, pest attractants and feeding stimulants, pH control components, postharvest treatments, rhealogical agents, safeners, UV protectants and/or wetting agents.

[1108] Examples of adhesives (stickers) that may be included in formulations of the present disclosure include, but not are not limited to, disaccharides (e.g. maltose, sucrose, trehalose), gums (e.g., cellulose gum, guar gum, gum arabic, gum combretum, xantham gum), maltodextrins (e.g., maltodextrins having a DEV of about 10 to about 20), monosaccharides, oils (e.g., mineral oil, olive oil, peanut oil, soybean oil and/or sunflower oil), and oligosaccharides. See generally, e.g., POWERBLOX™ (Dow, Midland, MI, USA), such as POWERBLOX™ ADJ-65 and POWERBLOX™ ADJ-65; EPO 0245970; U.S. Pat. No. 5,496,568; WO 2008/144024; WO 2009/135049; WO 2011/126832; WO 2017/083049; WO 2020/225276; WO 2021/055316; WO 2022/096688; WO 2022/096691; WO 2022/096692; WO 2022/096693; WO 2022/096694; WO/2022/096695; WO 2022/096696.

[1109] Examples of chemical actives that may be included in formulations of the present disclosure include, but not are not limited to, acaracides and miticides (e.g., carvacrol, sanguinarine, azobenzene, benzoximate, benzyl benzoate, bromopropylate, chlorbenside, chlorfenethol, chlorfenson, chlorfensulphide, chlorobenzilate, chloropropylate, cyflumetofen, DDT, dicofol, diphenyl sulfone, dofenapyn, fenson, fentrifanil, fluorbenside, genit, hexachlorophene, phenproxide, proclonol, tetradifon, tetrasul, benomyl, carbanolate, carbaryl, carbofuran, methiocarb, metolcarb, promacyl, propoxur, aldicarb, butocarboxim, oxamyl, thiocarboxime, thiofanox, bifenazate, binapacryl, dinex, dinobuton, dinocap-4, dinocap-6, dinocton, dinopenton, dinosulfon, dinoterbon, DNOC, amitraz, chlordimeform, chloromebuform, formetanate, formparanate, medimeform, semiamitraz, afoxolaner, fluralaner, sarolaner, tetranactin oavermectin acaricides, abamectin, doramectin, eprinomectin, ivermectin, selamectin, milbemectin, milbemycin oxime, moxidectin, clofentezine, cyromazine, diflovidazin, dofenapyn, fluazuron, flubenzimine, flucycloxuron, flufenoxuron, hexythiazox, bromocyclen, camphechlor, DDT, dienochlor, endosulfan, lindane, chlorfenvinphos, crotoxyphos, dichlorvos, heptenophos, mevinphos, monocrotophos, naled, TEPP, tetrachlorvinphos, amidithion, amiton, azinphos-ethyl, azinphos-methyl, azothoate, benoxafos, bromophos, bromophos-ethyl, carbophenothion, chlorpyrifos, chlorthiophos, coumaphos, cyanthoate, demeton-O, demeton-S, demeton-O-methyl, demeton-S-methyl, demeton-S-methylsulphon, dialifos, diazinon, dimethoate, dioxathion, disulfoton, endothion, ethion, ethoate-methyl, formothion, malathion, mecarbam, methacrifos, omethoate, oxydeprofos, oxydisulfoton, parathion, phenkapton, phorate, phosalone, phosmet, phostin, phoxim, pirimiphos-methyl, prothidathion, prothoate, pyrimitate, quinalphos, quintiofos, sophamide, sulfotep, thiometon, triazophos, trifenofos, vamidothion, trichlorfon, isocarbophos, methamidophos, propetamphos, dimefox, mipafox, schradan, azocyclotin, cyhexatin, fenbutatin oxide, phostin, dichlofluanid, dialifos, phosmet, cyenopyrafen, fenpyroximate, pyflubumide, tebufenpyrad, acetoprole, fipronil, vaniliprole, acrinathrin, bifenthrin, brofluthrinate, cyhalothrin, alpha-cypermethrin, fenpropathrin, fenvalerate, flucythrinate, flumethrin, tau-fluvalinate, permethrin, halfenprox, pyrimidifen, chlorfenapyr, sanguinarine, chinomethionat, thioquinox, bifujunzhi, fluacrypyrim, flufenoxystrobin, pyriminostrobin, aramite, propargite, spirodiclofen, clofentezine, diflovidazin, flubenzimine, hexythiazox, fenothiocarb, chloromethiuron, diafenthiuron, acequinocyl, amidoflumet, arsenous oxide, clenpirin, closantel, crotamiton, cycloprate, cymiazole, disulfiram, etoxazole, fenazaflor, fenazaquin, fluenetil, mesulfen, MNAF, nifluridide, nikkomycins, pyridaben, sulfiram, sulfluramid, sulfur, thuringiensin, triarathene, and combinations thereof); fungicides (e.g., strobilurins, such as azoxystrobin, coumethoxystrobin, coumoxystrobin, dimoxystrobin, enestroburin, fluoxastrobin, kresoxim-methyl, metominostrobin, orysastrobin, picoxystrobin, pyraclostrobin, pyrametostrobin, pyraoxystrobin, pyribencarb, trifloxystrobin, 2-[2-(2,5-dimethyl-phenoxymethyl)-phenyl]-3-methoxy-acrylic acid methyl ester and 2-(2-(3-(2,6-dichlorophenyl)-1-methyl-allylideneaminooxymethyl)-phenyl)-2-methoxyimino-N-methyl-acetamide; carboxamides, such as carboxanilides (e.g., benalaxyl, benalaxyl-M, benodanil, bixafen, boscalid, carboxin, fenfuram, fenhexamid, flutolanil, fluxapyroxad, furametpyr, isopyrazam, isotianil, kiralaxyl, mepronil, metalaxyl, metalaxyl-M (mefenoxam), ofurace, oxadixyl, oxycarboxin, penflufen, penthiopyrad, sedaxane, tecloftalam, thifluzamide, tiadinil, 2-amino-4-methyl-thiazole-5-carboxanilide, N-(4′-trifluoromethylthiobiphenyl-2-yl)-3-difluoromethyl-1-methyl-1H-pyra-zole-4-carboxamide, N-(2-(1,3,3-trimethylbutyl)-phenyl)-1,3-dimethyl-5-fluoro-1H-pyrazole-4-carboxamide), carboxylic morpholides (e.g., dimethomorph, flumorph, pyrimorph), benzoic acid amides (e.g., flumetover, fluopicolide, fluopyram, zoxamide), carpropamid, dicyclomet, mandiproamid, oxytetracyclin, silthiofam and N-(6-methoxy-pyridin-3-yl) cyclopropanecarboxylic acid amide; azoles, such as triazoles (e.g., azaconazole, bitertanol, bromuconazole, cyproconazole, difenoconazole, diniconazole, diniconazole-M, epoxiconazole, fenbuconazole, fluquinconazole, flusilazole, flutriafol, hexaconazole, imibenconazole, ipconazole, metconazole, myclobutanil, oxpoconazole, paclobutrazole, penconazole, propiconazole, prothioconazole, simeconazole, tebuconazole, tetraconazole, triadimefon, triadimenol, triticonazole, uniconazole) and imidazoles (e.g., cyazofamid, imazalil, pefurazoate, prochloraz, triflumizol); heterocyclic compounds, such as pyridines (e.g., fluazinam, pyrifenox (cf.D1b), 3-[5-(4-chloro-phenyl)-2,3-dimethyl-isoxazolidin-3-yl]-pyridine, 3-[5-(4-methyl-phenyl)-2,3-dimethyl-isoxazolidin-3-yl]-pyridine), pyrimidines (e.g., bupirimate, cyprodinil, diflumetorim, fenarimol, ferimzone, mepanipyrim, nitrapyrin, nuarimol, pyrimethanil), piperazines (e.g., triforine), pirroles (e.g., fenpiclonil, fludioxonil), morpholines (e.g., aldimorph, dodemorph, dodemorph-acetate, fenpropimorph, tridemorph), piperidines (e.g., fenpropidin), dicarboximides (e.g., fluoroimid, iprodione, procymidone, vinclozolin), non-aromatic 5-membered heterocycles (e.g., famoxadone, fenamidone, flutianil, octhilinone, probenazole, 5-amino-2-isopropyl-3-oxo-4-ortho-tolyl-2,3-dihydro-pyrazole-1-carbothioic acid S-allyl ester), acibenzolar-S-methyl, ametoctradin, amisulbrom, anilazin, blasticidin-S, captafol, captan, chinomethionat, dazomet, debacarb, diclomezine, difenzoquat, difenzoquat-methylsulfate, fenoxanil, Folpet, oxolinic acid, piperalin, proquinazid, pyroquilon, quinoxyfen, triazoxide, tricyclazole, 2-butoxy-6-iodo-3-propylchromen-4-one, 5-chloro-1-(4,6-dimethoxy-pyrimidin-2-yl)-2-methyl-1H-benzoimidazole and 5-chloro-7-(4-methylpiperidin-1-yl)-6-(2,4,6-trifluorophenyl)-[1,2,4]triazolo-[1,5-a]pyrimidine; benzimidazoles, such as carbendazim; and other active substances, such as guanidines (e.g., guanidine, dodine, dodine free base, guazatine, guazatine-acetate, iminoctadine), iminoctadine-triacetate and iminoctadine-tris(albesilate); antibiotics (e.g., kasugamycin, kasugamycin hydrochloride-hydrate, streptomycin, polyoxine and validamycin A); nitrophenyl derivates (e.g., binapacryl, dicloran, dinobuton, dinocap, nitrothal-isopropyl, tecnazen); organometal compounds (e.g., fentin salts, such as fentin-acetate, fentin chloride, fentin hydroxide); sulfur-containing heterocyclyl compounds (e.g., dithianon, isoprothiolane); organophosphorus compounds (e.g., edifenphos, fosetyl, fosetyl-aluminum, iprobenfos, phosphorus acid and its salts, pyrazophos, tolclofos-methyl); organochlorine compounds (e.g., chlorothalonil, dichlofluanid, dichlorophen, flusulfamide, hexachlorobenzene, pencycuron, pentachlorphenole and its salts, phthalide, quintozene, thiophanate-methyl, thiophanate, tolylfluanid, N-(4-chloro-2-nitro-phenyl)-N-ethyl-4-methyl-benzenesulfonamide), inorganic active substances (e.g., Bordeaux mixture, copper acetate, copper hydroxide, copper oxychloride, basic copper sulfate, phosphite salt, sulfur, zinc sulfate), natamycin, and combinations thereof); gastropodicides (e.g., methiocarb, metaldehyde, carbaryl, spinosad, copper sulfate in combination with lime, boric acid, iron phosphate, and combinations thereof); herbicides (e.g., 2,4-dichlorophenoxyacetic acid (2,4-D), 2,4,5-trichlorophenoxyacetic acid (2,4,5-T), ametryn, amicarbazone, aminocyclopyrachlor, acetochlor, acifluorfen, alachlor, atrazine, azafenidin, bentazon, benzofenap, bifenox, bromacil, bromoxynil, butachlor, butafenacil, butroxydim, carfentrazone-ethyl, chlorimuron, chlorotoluro, clethodim, clodinafop, clomazone, cyanazine, cycloxydim, cyhalofop, desmedipham, desmetryn, dicamba, diclofop, dimefuron, diuron, dithiopyr, fenoxaprop, fluazifop, fluazifop-P, fluometuron, flufenpyr-ethyl, flumiclorac-pentyl, flumioxazin, fluoroglycofen, fluthiacet-methyl, fomesafe, fomesafen, glyphosate, glufosinate, haloxyfop, hexazinone, imazamox, imazaquin, imazethapyr, ioxynil, isoproturon, isoxaflutole, lactofen, linuron, mecoprop, mecoprop-P, mesotrion, metamitron, metazochlor, methibenzuron, metolachlor (and S-metolachlor), metoxuron, metribuzin, monolinuron, oxadiargyl, oxadiazon, oxyfluorfen, phenmedipham, pretilachlor, profoxydim, prometon, prometry, propachlor, propanil, propaquizafop, propisochlor, pyraflufen-ethyl, pyrazon, pyrazolynate, pyrazoxyfen, pyridate, quizalofop, quizalofop-P (e.g., quizalofop-ethyl, quizalofop-P-ethyl, clodinafop-propargyl, cyhalofop-butyl, diclofop-methyl, fenoxaprop-P-ethyl, fluazifop-P-butyl, haloxyfop-methyl, haloxyfop-R-methyl), saflufenacil, sethoxydim, siduron, simazine, simetryn, sulcotrione, sulfentrazone, tebuthiuron, tembotrione, tepraloxydim, terbacil, terbumeton, terbuthylazine, thaxtomin (e.g., the thaxtomins described in U.S. Pat. No. 7,989,393), thenylchlor, tralkoxydim, triclopyr, trietazine, tropramezone, salts and esters thereof; racemic mixtures and resolved isomers thereof and combinations thereof); and insecticides and nematicides (e.g., antibiotic insecticides such as allosamidin and thuringiensin; macrocyclic lactone insecticides such as spinosad, spinetoram, and other spinosyns including the 21-butenyl spinosyns and their derivatives; avermectin insecticides such as abamectin, doramectin, emamectin, eprinomectin, ivermectin and selamectin; milbemycin insecticides such as lepimectin, milbemectin, milbemycin oxime and moxidectin; arsenical insecticides such as calcium arsenate, copper acetoarsenite, copper arsenate, lead arsenate, potassium arsenite and sodium arsenite; other biological insecticides, plant incorporated protectant insecticides such as Cry1Ab, Cry1Ac, Cry1F, Cry1A.105, Cry2Ab2, Cry3A, mir Cry3A, Cry3Bb1, Cry34, Cry35, and VIP3A; botanical insecticides such as anabasine, azadirachtin, d-limonene, nicotine, pyrethrins, cinerins, cinerin I, cinerin II, jasmolin I, jasmolin II, pyrethrin I, pyrethrin II, quassia, rotenone, ryania and sabadilla; carbamate insecticides such as bendiocarb and carbaryl; benzofuranyl methylcarbamate insecticides such as benfuracarb, carbofuran, carbosulfan, decarbofuran and furathiocarb; dimethylcarbamate insecticides dimitan, dimetilan, hyquincarb and pirimicarb; oxime carbamate insecticides such as alanycarb, aldicarb, aldoxycarb, butocarboxim, butoxycarboxim, methomyl, nitrilacarb, oxamyl, tazimcarb, thiocarboxime, thiodicarb and thiofanox; phenyl methylcarbamate insecticides such as allyxycarb, aminocarb, bufencarb, butacarb, carbanolate, cloethocarb, dicresyl, dioxacarb, EMPC, ethiofencarb, fenethacarb, fenobucarb, isoprocarb, methiocarb, metolcarb, mexacarbate, promacyl, promecarb, propoxur, trimethacarb, XMC and xylylcarb; dinitrophenol insecticides such as dinex, dinoprop, dinosam and DNOC; fluorine insecticides such as barium hexafluorosilicate, cryolite, sodium fluoride, sodium hexafluorosilicate and sulfluramid; formamidine insecticides such as amitraz, chlordimeform, formetanate and formparanate; fumigant insecticides such as acrylonitrile, carbon disulfide, carbon tetrachloride, chloroform, chloropicrin, para-dichlorobenzene, 1,2-dichloropropane, ethyl formate, ethylene dibromide, ethylene dichloride, ethylene oxide, hydrogen cyanide, iodomethane, methyl bromide, methylchloroform, methylene chloride, naphthalene, phosphine, sulfuryl fluoride and tetrachloroethane; inorganic insecticides such as borax, calcium polysulfide, copper oleate, mercurous chloride, potassium thiocyanate and sodium thiocyanate; chitin synthesis inhibitors such as bistrifluoron, buprofezin, chlorfluazuron, cyromazine, diflubenzuron, flucycloxuron, flufenoxuron, hexaflumuron, lufenuron, novaluron, noviflumuron, penfluoron, teflubenzuron and triflumuron; juvenile hormone mimics such as epofenonane, fenoxycarb, hydroprene, kinoprene, methoprene, pyriproxyfen and triprene; juvenile hormones such as juvenile hormone I, juvenile hormone II and juvenile hormone III; moulting hormone agonists such as chromafenozide, halofenozide, methoxyfenozide and tebufenozide; moulting hormones such as .alpha.-ecdysone and ecdysterone; moulting inhibitors such as diofenolan; precocenes such as precocene I, precocene II and precocene III; unclassified insect growth regulators such as dicyclanil; nereistoxin analogue insecticides such as bensultap, cartap, thiocyclam and thiosultap; nicotinoid insecticides such as flonicamid; nitroguanidine insecticides such as clothianidin, dinotefuran, imidacloprid and thiamethoxam; nitromethylene insecticides such as nitenpyram and nithiazine; pyridylmethylamine insecticides such as acetamiprid, imidacloprid, nitenpyram and thiacloprid; organochlorine insecticides such as bromo-DDT, camphechlor, DDT, pp′-DDT, ethyl-DDD, HCH, gamma-HCH, lindane, methoxychlor, pentachlorophenol and TDE; cyclodiene insecticides such as aldrin, bromocyclen, chlorbicyclen, chlordane, chlordecone, dieldrin, dilor, endosulfan, endrin, HEOD, heptachlor, HHDN, isobenzan, isodrin, kelevan and mirex; organophosphate insecticides such as bromfenvinfos, chlorfenvinphos, crotoxyphos, dichlorvos, dicrotophos, dimethylvinphos, fospirate, heptenophos, methocrotophos, mevinphos, monocrotophos, naled, naftalofos, phosphamidon, propaphos, TEPP and tetrachlorvinphos; organothiophosphate insecticides such as dioxabenzofos, fosmethilan and phenthoate; aliphatic organothiophosphate insecticides such as acethion, amiton, cadusafos, chlorethoxyfos, chlormephos, demephion, demephion-O, demephion-S, demeton, demeton-O, demeton-S, demeton-methyl, demeton-O-methyl, demeton-S-methyl, demeton-S-methylsulphon, disulfoton, ethion, ethoprophos, IPSP, isothioate, malathion, methacrifos, oxydemeton-methyl, oxydeprofos, oxydisulfoton, phorate, sulfotep, terbufos and thiometon; aliphatic amide organothiophosphate insecticides such as amidithion, cyanthoate, dimethoate, ethoate-methyl, formothion, mecarbam, omethoate, prothoate, sophamide and vamidothion; oxime organothiophosphate insecticides such as chlorphoxim, phoxim and phoxim-methyl; heterocyclic organothiophosphate insecticides such as azamethiphos, coumaphos, coumithoate, dioxathion, endothion, menazon, morphothion, phosalone, pyraclofos, pyridaphenthion and quinothion; benzothiopyran organothiophosphate insecticides such as dithicrofos and thicrofos; benzotriazine organothiophosphate insecticides such as azinphos-ethyl and azinphos-methyl; isoindole organothiophosphate insecticides such as dialifos and phosmet; isoxazole organothiophosphate insecticides such as isoxathion and zolaprofos; pyrazolopyrimidine organothiophosphate insecticides such as chlorprazophos and pyrazophos; pyridine organothiophosphate insecticides such as chlorpyrifos and chlorpyrifos-methyl; pyrimidine organothiophosphate insecticides such as butathiofos, diazinon, etrimfos, lirimfos, pirimiphos-ethyl, pirimiphos-methyl, primidophos, pyrimitate and tebupirimfos; quinoxaline organothiophosphate insecticides such as quinalphos and quinalphos-methyl; thiadiazole organothiophosphate insecticides such as athidathion, lythidathion, methidathion and prothidathion; triazole organothiophosphate insecticides such as isazofos and triazophos; phenyl organothiophosphate insecticides such as azothoate, bromophos, bromophos-ethyl, carbophenothion, chlorthiophos, cyanophos, cythioate, dicapthon, dichlofenthion, etaphos, famphur, fenchlorphos, fenitrothion fensulfothion, fenthion, fenthion-ethyl, heterophos, jodfenphos, mesulfenfos, parathion, parathion-methyl, phenkapton, phosnichlor, profenofos, prothiofos, sulprofos, temephos, trichlormetaphos-3 and trifenofos; phosphonate insecticides such as butonate and trichlorfon; phosphonothioate insecticides such as mecarphon; phenyl ethylphosphonothioate insecticides such as fonofos and trichloronat; phenyl phenylphosphonothioate insecticides such as cyanofenphos, EPN and leptophos; phosphoramidate insecticides such as crufomate, fenamiphos, fosthietan, imicyafos, mephosfolan, phosfolan and pirimetaphos; phosphoramidothioate insecticides such as acephate, isocarbophos, isofenphos, methamidophos and propetamphos; phosphorodiamide insecticides such as dimefox, mazidox, mipafox and schradan; oxadiazine insecticides such as indoxacarb; phthalimide insecticides such as dialifos, phosmet and tetramethrin; pyrazole insecticides such as acetoprole, ethiprole, fipronil, pyrafluprole, pyriprole, tebufenpyrad, tolfenpyrad and vaniliprole; pyrethroid ester insecticides such as acrinathrin, allethrin, bioallethrin, barthrin, bifenthrin, bioethanomethrin, cyclethrin, cycloprothrin, cyfluthrin, beta-cyfluthrin, cyhalothrin, gamma-cyhalothrin, lambda-cyhalothrin, cypermethrin, alpha-cypermethrin, beta-cypermethrin, theta-cypermethrin, zeta-cypermethrin, cyphenothrin, deltamethrin, dimefluthrin, dimethrin, empenthrin, fenfluthrin, fenpirithrin, fenpropathrin, fenvalerate, esfenvalerate, flucythrinate, fluvalinate, tau-fluvalinate, furethrin, imiprothrin, metofluthrin, permethrin, biopermethrin, transpermethrin, phenothrin, prallethrin, profluthrin, pyresmethrin, resmethrin, biopermethrin, cismethrin, tefluthrin, terallethrin, tetramethrin, tralomethrin and transfluthrin; pyrethroid ether insecticides such as etofenprox, flufenprox, halfenprox, protrifenbute and silafluofen; pyrimidinamine insecticides such as flufenerim and pyrimidifen; pyrrole insecticides such as chlorfenapyr; tetronic acid insecticides such as spirodiclofen, spiromesifen and spirotetramat; thiourea insecticides such as diafenthiuron; urea insecticides such as flucofuron and sulcofuron; and unclassified insecticides such as AKD-3088, chlorantraniliprole, closantel, crotamiton, cyflumetofen, E2Y45, EXD, fenazaflor, fenazaquin, fenoxacrim, fenpyroximate, FKI-1033, flubendiamide, HGW86, hydramethylnon, IKI-2002, isoprothiolane, malonoben, metaflumizone, metoxadiazone, nifluridide, NNI-9850, NNI-0101, pymetrozine, pyridaben, pyridalyl, pyrifluquinazon, Qcide, rafoxanide, Rynaxypyr™, SYJ-159, triarathene and triazamate, and combinations thereof). It is to be understood that formulation of the present disclosure may comprise any suitable combination of chemical actives and may therefore comprise two, three, four, five, six, seven, eight, nine, ten or more of the aforementioned actives. Conversely, in some embodiments, one, two, three, four, five, six, seven, eight, nine, ten or more of the aforementioned actives are expressly excluded from formulation of the present disclosure.

[1110] Non-limiting examples of chemical active compositions that may be incorporated into formulations of the present disclosure—or into which proteins and other compositions of the present disclosure may be incorporated—include, but are not limited to, commercial products sold under the tradenames AGCELENCE®, REVYSOL®, XEMIUM®, INITIUM®, F 500®, CLEARFIELD®, KIXOR and SERIFEL® from BASF (Ludwigshafen, Germany); CORVUS®, POWERMAX®, DELARO®, PROSARO®, BAYTHROID®, SIVANTO®, FINISH®, GINSTAR®, ACCELERON®, RAXIL®, AERIS®, EVERGOL®, TRILEX®, ALLEGIANCE®, BUTEO, EMESTO®, GAUCHO®, PONCHO® and THIRAM® from Bayer Crop Science (Creve Coeur, MO, USA); ABUNDIT®, ACCENT®, AFFORIA®, APROACH®, BASIS®, BEXFOND®, BLACKHAWK®, CANOPY®, CINCH®, CLINHER®, CURTAIL®, CURZATE®, DELEGATE®, RAINSHIELD®, DITHANE®, FEXAPAN®, VAPORGRIP®, LANNATE®, TANOS®, DURANGO®, DMA®, ELEVORE®, EMBED®, ENABLE®, ENLIST DUO®, ENLIST ONE®, ENLITE®, ENTRUST®, ENVIVE®, EVERPLEX®, FONTELIS®, FULTIME®, GOLDSKY®, GRANDSTAND®, GRANITE®, GRASP®, HEARKEN®, INDAR®, NXTGEN®, INSTINCT®, INTREPID 2F®, INTREPID EDGE®, KERB®, KEYSTONE®, KYBER®, LEADOFF®, LOYANT®, MATRIX®, N-SERVE®, NOVIXID®, OPENSKY®, PERFECTMATCH®, PINDAR®, PIXXARO®, POWERFLEX®, QUELEX®, RADIANT®, RALLY®, REALM®, REBELEX®, RESICORE®, RESOLVE®, REVULIN®, REZUVANT®, RIDGEBACK®, SEQUOIA®, SIMPLICITY®, SONIC®, STARANE®, STEADFAST®, STINGER®, STRONGARM®, SUCCESS®, SURESTART®, SURPASS®, SURVEIL®, SYNCHRONY®, TARZEC®, TRANSFORM®, TRELLIS®, TRIVENCE®, UTRISHA®, VERTISAN®, VYDATE®, WIDEARMATCH®, WIDEMATCH® and ZEST® from Corteva Agroscience (Indianapolis, IN, USA); BIO-SAVE® from Decco U.S. Post-Harvest, Inc. (Monrovia, CA, USA); ALTACOR®, ATHENA®, AVAUNT®, BELEAF®, BRIGADE®, CARBINE®, CORAGEN®, ELEVEST®, EXIREL®, GLADIATOR®, HERO®, MUSTANG®, PREVATHON®, STEWARD®, VANTACOR®, VERIMARK®, LUCENTO®, RHYME®, ROVRAL®, TOPGUARD®, TERRA®, XYWAY®, AFFINITY®, AGILITY®, AIM®, ALLY®, ANTHEM®, AUTHORITY®, CAPTURE®®, ETHOS®, TEMITRY®, CADET®, COMMAND®, DISPLAY®, EXPRESS®, FINESSE®, FIRSTSHOT®, HARMONY®, MARVEL®, OBEY®, PANOFLEX®, SHARK®, SOLIDA®, SPARTAN®, UPBEET®, and ZEUS®, from FMC Corporation (Philadelphia, PA, USA); PENTIA®, ABAMEX®, AGRI TIN®, CHAMP®, CHIPTOX®, GIN OUT®, KAISO®, MEPEX®, NUPRID®, RAPPORT®, TERMINATE®, THISTROL®, ULTRA FLOURISH®, GOAL®, GOALTENDER®, GRAPPLE®, TUSCANY®, CHAMPION++, AGRI-MYCIN®, PHOSTROL®, BLIGHTBAN®, CHEETAH®, MYCOSHIELD®, RITEWAY®, TAZER®, MYSTIC®, CUPROXAT® and TYPY® from Nufarm Limited (Victoria, Australia); BIOSPECTRA®, PACRITE®, EFOG®, SHIELD-BRITE®, FUNGAFLOR®, PENBOTEC, and SOPP from Pace International (Wapato, WA, USA); ALUMNI®, CHAIRMAN®, GRADUATE®, GRADUATEA+®, MENTOR®, MERTECT®, SCHOLAR® and STADIUM® from Syngenta Crop Protection (Basel, Switzerland); and ASULOX®, BALISTIK®, BEETUP®, BELLMAC®, BETASANA®, BETTIX®, BUGUIS®, CENTURION®, CLIOPHAR®, COLZAMID®, CORZAL®, DEFIANT®, DEVRINOL®, MINSTREL®, AFFIX®, AXIDOR®, BUZZ®, MIMIX®, DIOZINOS®, DIPROSPERO®, EVITO®, MANZATE®, MICROTHIOL®, NAUTILE®, PENNCOZEB®, PROMESS®, PROPLANT®, PROXANIL®, PYRUS®, SACRON®, SYLLIT®, TEBUZOL®, THIOPRON®, TOKYO®, UNIZEB®, VACCIPLANT®, VIDEO®, ZOXIS®, CYTHRIN®, DIMILIN®, FORESTER®, FUMICYP®, TALISMA®, B-NINE®, FAZOR®, GYRO®, HIMALAYA®, ICENI®, TRINEXIS®, IODUS®, AUDIT®, BASAGRAN®, BATLIUM®, BOYCOTT®, BROADLOOM®, COYOTE®, COLLIDE®, DUET®, ETHOTRON®, EVEREST®, IMIFLEX®, LIFELINE®, METRICOR®, MOCCASIN®, MOTIF®, PRE-PARE®, SATELLITE®, SHADOW®, SHUTDOWN®, STAM®, SUPERWHAM!®, SUPREMACY®, TRICOR®, TRIZENTA®, CUPROFIX®, DEXTER®, ELEVATE®, ELIXIR®, FORTIX®, FROGHORN®, METEOR®, MICROTHI®, ORANIL®, PH-D®, PROCURE®, RANCOVA®, TEPERA®, TERRAGUARD®, TERRAMASTER®, TERRAZOLE®, TOPSIN®, TRIONIC®, ZIRAM®, ZOLERA®, ADIOS®, GOLDWING®, OFF-SHOOT-T®, PACZOL®, ROYAL®, ROYALTAC®, ACENTHRIN®, ACEPHATE®, ACRAMITE®, ADEPT®, ARGYLE®, ASSAIL®, BANTER®, BIFENTURE®, BIOMITE®, COMITE®, DIMILIN®, ENKOUNTER®, INTRUDER®, KANEMITE®, LAMBDA-CY®, MICROMITE®, OMITE®, PEDESTAL®, PERM-UP®, RIMON®, STRAFER®, TURNSTYLE®, UP-CYDE®, VENDEX®, VIGILANT®, ZYLO®, ATTENDANT®, BEAN GUARD®, ALLEGIANCE®, BELMONT®, ENHANCE®, GRAINGUARD®, MESH®, PRO-GRO®, RANCONA®, STARTUP®, THIRAM®, VITAFLO®, VITAVAX®, MAGNAPHOS®, WEEVIL-CIDE®, AQUASTRIKE®, AQUATHOL®, PEGASUS, GOLIATH, POACONSTRICTO®, RAVEN, T-BIRD, UP-END®, UP-START®, ETHEPHON PEGASUS, GOLIATH, POACONSTRICTO®, RAVEN, T-BIRD, UP-END®, UP-START®, ZEBA® and FLORAMITE® from UPL Limited (Mumbai, Maharashtra, India).

[1111] Examples of dispersants (spreaders) that may be included in formulations of the present disclosure include, but not are not limited to, anionic surfactants, cationic surfactants and non-ionic surfactants. See generally, e.g., EP 0245970; U.S. Pat. No. 5,496,568; WO 2008/144024; WO 2009/135049; WO 2011/126832; WO 2017/083049; WO 2020/225276; WO 2021/055316; WO 2022/096688; WO 2022/096691; WO 2022/096692; WO 2022/096693; WO 2022/096694; WO/2022/096695; WO 2022/096696.

[1112] In some embodiments, formulations of the present disclosure comprise one or more anionic surfactants. For example, in some embodiments, formulations of the present disclosure comprise one or more anionic surfactants selected from the group consisting of alkyl carboxylates (e.g., sodium stearate), alkyl sulfates (e.g., alkyl lauryl sulfate, sodium lauryl sulfate), alkyl ether sulfates, alkyl amido ether sulfates, alkyl aryl polyether sulfates, alkyl aryl sulfates, alkyl aryl sulfonates, alkyl sulfonates, alkyl amide sulfonates, alkyl aryl sulfonates, alkyl benzene sulfonates, alkyl diphenyloxide sulfonate, alpha-olefin sulfonates, alkyl naphthalene sulfonates, paraffin sulfonates, alkyl sulfosuccinates, alkyl ether sulfosuccinates, alkylamide sulfosuccinates, alkyl sulfosuccinamates, alkyl sulfoacetates, alkyl phosphates, alkyl ether phosphates, acyl sarconsinates, acyl isethionates, N-acyl taurates, N-acyl-N-alkyltaurates, benzene sulfonates, cumene sulfonates, dioctyl sodium sulfosuccinate, ethoxylated sulfosuccinates, lignin sulfonates, linear alkylbenzene sulfonates, monoglyceride sulfates, perfluorobutanesulfonate, perfluorooctanesulfonate, phosphate ester, styrene acrylic polymers, toluene sulfonates and xylene sulfonates.

[1113] In some embodiments, formulations of the present disclosure comprise one or more cationic surfactants. For example, in some embodiments, formulations of the present disclosure comprise one or more cationic surfactants selected from the group consisting of alkyltrimethylammonium salts (e.g., cetyl trimethylammonium bromide, cetyl trimethylammonium chloride), cetylpyridinium chloride, benzalkonium chloride, benzethonium chloride, 5-Bromo-5-nitro-1,3-dioxane, dimethyldioctadecylammonium chloride, cetrimonium bromide, dioctadecyldimethylammonium bromide and/or octenidine dihydrochloride.

[1114] In some embodiments, formulations of the present disclosure comprise one or more nonionic surfactants. For example, in some embodiments, formulations of the present disclosure comprise one or more nonionic surfactants selected from the group consisting of alcohol ethoxylates (e.g., TERGITOL™ 15-S surfactants (The Dow Chemical Company, Midland, MI), such as TERGITOL™15-S-9, alkanolamides, alkanolamine condensates, carboxylic acid esters, cetostearyl alcohol, cetyl alcohol, cocamide DEA, dodecyldimethylamine oxides, ethanolamides, ethoxylates of glycerol ester and glycol esters, ethylene oxide polymers, ethylene oxide-propylene oxide copolymers, glucoside alkyl ethers, glycerol alkyl ethers, glycerol esters, glycol alkyl ethers (e.g., polyoxyethylene glycol alkyl ethers, polyoxypropylene glycol alkyl ethers), glycol alkylphenol ethers (e.g., polyoxyethylene glycol alkylphenol ethers,), glycol esters, monolaurin, pentaethylene glycol monododecyl ethers, poloxamer, polyamines, polyglycerol polyricinoleate, polysorbate, polyoxyethylenated fatty acids, polyoxyethylenated mercaptans, polyoxyethylenated polyoxyproylene glycols, polyoxyethylene glycol sorbitan alkyl esters, polyethylene glycol-polypropylene glycol copolymers, polyoxyethylene glycol octylphenol ethers, polyvinyl pynolidones, sugar-based alkyl polyglycosides, sulfoanylamides, sorbitan fatty acid alcohol ethoxylates, sorbitan fatty acid ester ethoxylates, sorbitan fatty acid ester and/or tertiary acetylenic glycols.

[1115] In some embodiments, formulations of the present disclosure comprise one or more zwitterionic surfactants. For example, in some embodiments, formulations of the present disclosure comprise one or more zwitterionic surfactants selected from the group consisting of 3-[(3-cholamidopropyl)dimethylammonio]-1-propanesulfonate, cocamidopropyl betaine, cocamidopropyl hydroxysultaine, phosphatidylserine, phosphatidylethanolamine, phosphatidylcholine and/or one or more sphingomyelins.

[1116] In some embodiments, formulations of the present disclosure comprise one or more soaps and/or organosilicone surfactants.

[1117] Non-limiting examples of dispersants that may be incorporated into formulations of the present disclosure—or into which proteins and other compositions of the present disclosure may be incorporated—include ATLOX™ (e.g., 4916, 4991; Croda International PLC, Edison, NJ), ATLOX METASPERSE™ (Croda International PLC, Edison, NJ), BIO-SOFT® (e.g., N series, such as N1-3, N1-7, N1-5, N1-9, N23-3, N2.3-6.5, N25-3, N25-7, N25-9, N91-2.5, N91-6, N91-8; Stepan Company, Northfield, IL), MAKON® nonionic surfactants (e.g., DA-4, DA-6 and DA-9; Stepan Company, Northfield, IL), MORWET® powders (Akzo Nobel Surface Chemistry LLC, Chicago, IL), MULTIWET™ surfactants (e.g., MO-85P-PW-(AP); Croda International PLC, Edison, NJ), SILWET® L-77 (Helena Chemical Company, Collierville, TN), SPAN™ surfactants (e.g., 20, 40, 60, 65, 80 and 85; Croda Inc., Edison NJ), TAMOL™ dispersants (The Dow Chemical Company, Midland, MI), TERGITOL™ surfactants (e.g., TMN-6 and TMN-100X; The Dow Chemical Company, Midland, MI), TERSPERSE surfactants (e.g., 2001, 2020, 2100, 2105, 2158, 2700, 4894 and 4896; Hunstman Corp., The Woodlands, TX), TRITON™ surfactants (e.g., X-100; The Dow Chemical Company, Midland, MI), TWEEN® surfactants (e.g., TWEEN® 20, 21, 22, 23, 28, 40, 60, 61, 65, 80, 81 and 85; Croda International PLC, Edison, NJ) and combinations thereof. Additional examples of dispersants may be found in BAIRD & ZUBLENA. 1993. SOIL FACTS: USING WETTING AGENTS (NONIONIC SURFACTANTS) ON SOIL (North Carolina Cooperative Extension Service Publication AG-439-25) (1993); BURGES, FORMULATION OF MICROBIAL BIOPESTICIDES: BENEFICIAL MICROORGANISMS, NEMATODES AND SEED TREATMENTS (Springer Science & Business Media) (2012); MCCARTY, WETTING AGENTS (Clemson University Cooperative Extension Service Publication) (2001).

[1118] Examples of drying agents that may be included in formulations of the present disclosure include, but not are not limited to, drying powders. Non-limiting examples of drying agents include AEROSIL® hydrophobic fumed silica powders (Evonik Corporation, Parsippany, NJ), BENTOLITE® powders (BYK-Chemie GmbH, Wesel, Germany), INCOTEC® powders (INCOTEC Inc., Salinas, CA), SIPERNAT® silica powders (Evonik Corporation, Parsippany, NJ) and combinations thereof. Additional examples of drying agents may be found in BURGES, FORMULATION OF MICROBIAL BIOPESTICIDES: BENEFICIAL MICROORGANISMS, NEMATODES AND SEED TREATMENTS (Springer Science & Business Media) (2012). In some embodiments, compositions of the present disclosure comprise calcium stearate, clay (e.g., attapulgite clay, montmorillonite clay), graphite, magnesium stearate, magnesium sulfate, powdered milk, silica (e.g., fumed silica, hydrophobically-coated silica, precipitated silica), soy lecithin and/or talc.

[1119] Examples of microbes that may be included in formulations of the present disclosure include, but not are not limited to, diazotrophs, phosphate-solubilizing microorganisms and biopesticides. See generally, e.g., WO 92/08355; US 2003/082164; US 2008/320615; US 2016/345588; US 2018/168168; US 2005/187107; US 2006/258534; US 2018/279624; U.S. Ser. No. 10/820,594; US 2019/014786; U.S. Ser. No. 10/874,109; U.S. Ser. No. 10/856,552; US 2019/014787; U.S. Ser. No. 11/076,603; US 2020/093125; US 2020/085065; US 2020/000098; US 2019/345572; US 2020/263734; WO 2021/101949; WO 2021/101937; WO 2016/201284; WO 2018/186307; WO 2007/142543; WO 2017/205800; WO 2015/003908; WO 2021/018321; WO 2003/016510; WO 2016/044542; WO 92/11856.

[1120] In some embodiments, formulations of the present disclosure comprise one or more of the following: Azospirillum brasilense INTA Az-39, Bacillus amyloliquefaciens D747, Bacillus amyloliquefaciens NRRL B 50349, Bacillus amyloliquefaciens TJ1000, Bacillus amyloliquefaciens FZB24, Bacillus amyloliquefaciens FZB42, Bacillus amyloliquefaciens IN937a, Bacillus amyloliquefaciens IT-45, Bacillus amyloliquefaciens TJ1000, Bacillus amyloliquefaciens MBI600, Bacillus amyloliquefaciens BS27 (deposited as NRRL B-5015), Bacillus amyloliquefaciens BS2084 (deposited as NRRL B-50013), Bacillus amyloliquefaciens 15AP4 (deposited as ATCC PTA-6507), Bacillus amyloliquefaciens 3AP4 (deposited as ATCC PTA-6506), Bacillus amyloliquefaciens LSSA01 (deposited as NRRL B-50104), Bacillus amyloliquefaciens ABP278 (deposited as NRRL B-50634), Bacillus amyloliquefaciens 1013 (deposited as NRRL B-50509), Bacillus amyloliquefaciens 918 (deposited as NRRL B-50508), Bacillus amyloliquefaciens 22CP1 (deposited as ATCC PTA-6508) and Bacillus amyloliquefaciens BS18 (deposited as NRRL B-50633), Bacillus cereus I-1562, Bacillus firmus I-1582, Bacillus lichenformis BA842 (deposited as NRRL B-50516), Bacillus lichenformis BL21 (deposited as NRRL B-50134), Bacillus mycoides NRRL B-21664, Bacillus pumilus NRRL B 21662, Bacillus pumilus NRRL B-30087, Bacillus pumilus ATCC 55608, Bacillus pumilus ATCC 55609, Bacillus pumilus GB34, Bacillus pumilus KFP9F, Bacillus pumilus QST 2808, Bacillus subtilis ATCC 55078, Bacillus subtilis ATCC 55079, Bacillus subtilis MBI 600, Bacillus subtilis NRRL B-21661, Bacillus subtilis NRRL B-21665, Bacillus subtilis CX-9060, Bacillus subtilis GB03, Bacillus subtilis GB07, Bacillus subtilis QST-713, Bacillus subtilis FZB24, Bacillus subtilis D747, Bacillus subtilis 3BP5 (deposited as NRRL B-50510), Bacillus thuringiensis ATCC 13367, Bacillus thuringiensis GC-91, Bacillus thuringiensis NRRL B-21619, Bacillus thuringiensis ABTS-1857, Bacillus thuringiensis SAN 401 I, Bacillus thuringiensis ABG-6305, Bacillus thuringiensis ABG-6346, Bacillus thuringiensis AM65-52, Bacillus thuringiensis SA-12, Bacillus thuringiensis SB4, Bacillus thuringiensis ABTS-351, Bacillus thuringiensis HD-1, Bacillus thuringiensis EG 2348, Bacillus thuringiensis EG 7826, Bacillus thuringiensis EG 7841, Bacillus thuringiensis DSM 2803, Bacillus thuringiensis NB-125, Bacillus thuringiensis NB-176, Bradyrhizobium spp. 8A57, Bradyrhizobium elkanii SEMIA 501, Bradyrhizobium elkanii SEMIA 587, Bradyrhizobium elkanii SEMIA 5019, Bradyrhizobium japonicum 61A227, Bradyrhizobium japonicum 61A228, Bradyrhizobium japonicum 61A273, Bradyrhizobium japonicum E-109, Bradyrhizobium japonicum NRRL B-50586 (also deposited as NRRL B-59565), Bradyrhizobium japonicum NRRL B-50587 (also deposited as NRRL B-59566), Bradyrhizobium japonicum NRRL B-50588 (also deposited as NRRL B-59567), Bradyrhizobium japonicum NRRL B-50589 (also deposited as NRRL B-59568), Bradyrhizobium japonicum NRRL B-50590 (also deposited as NRRL B-59569), Bradyrhizobium japonicum NRRL B-50591 (also deposited as NRRL B-59570), Bradyrhizobium japonicum NRRL B-50592 (also deposited as NRRL B-59571), Bradyrhizobium japonicum NRRL B-50593 (also deposited as NRRL B-59572), Bradyrhizobium japonicum NRRL B-50594 (also deposited as NRRL B-50493), Bradyrhizobium japonicum NRRL B-50608, Bradyrhizobium japonicum NRRL B-50609, Bradyrhizobium japonicum NRRL B-50610, Bradyrhizobium japonicum NRRL B-50611, Bradyrhizobium japonicum NRRL B-50612, Bradyrhizobium japonicum NRRL B-50726, Bradyrhizobium japonicum NRRL B-50727, Bradyrhizobium japonicum NRRL B-50728, Bradyrhizobium japonicum NRRL B-50729, Bradyrhizobium japonicum NRRL B-50730, Bradyrhizobium japonicum SEMIA 566, Bradyrhizobium japonicum SEMIA 5079, Bradyrhizobium japonicum SEMIA 5080, Bradyrhizobium japonicum USDA 6, Bradyrhizobium japonicum USDA 110, Bradyrhizobium japonicum USDA 122, Bradyrhizobium japonicum USDA 123, Bradyrhizobium japonicum USDA 127, Bradyrhizobium japonicum USDA 129, Bradyrhizobium japonicum USDA 532C, Gliocladium virens ATCC 52045, Gliocladium virens GL-21, Glomus intraradices RTI-801, Metarhizium anisopliae F52, Penicillium bilaiae ATCC 18309, Penicillium bilaiae ATCC 20851, Penicillium bilaiae ATCC 22348, Penicillium bilaiae NRRL 50162, Penicillium bilaiae NRRL 50169, Penicillium bilaiae NRRL 50776, Penicillium bilaiae NRRL 50777, Penicillium bilaiae NRRL 50778, Penicillium bilaiae NRRL 50777, Penicillium bilaiae NRRL 50778, Penicillium bilaiae NRRL 50779, Penicillium bilaiae NRRL 50780, Penicillium bilaiae NRRL 50781, Penicillium bilaiae NRRL 50782, Penicillium bilaiae NRRL 50783, Penicillium bilaiae NRRL 50784, Penicillium bilaiae NRRL 50785, Penicillium bilaiae NRRL 50786, Penicillium bilaiae NRRL 50787, Penicillium bilaiae NRRL 50788, Penicillium bilaiae RS7B-SD1, Penicillium brevicompactum AgRF18, Penicillium canescens ATCC 10419, Penicillium expansum ATCC 24692, Penicillium expansum YT02, Penicillium fellatanum ATCC 48694, Penicillium gaestrivorus NRRL 50170, Penicillium glabrum DAOM 239074, Penicillium glabrum CBS 229.28, Penicillium janthinellum ATCC 10455, Penicillium lanosocoeruleum ATCC 48919, Penicillium radicum ATCC 201836, Penicillium radicum FRR 4717, Penicillium radicum FRR 4719, Penicillium radicum N93/47267, Penicillium raistrickii ATCC 10490, Pseudomonas jessenii PS06, Rhizobium leguminosarum SO12A-2 (IDAC 080305-01), Sinorhizobium fredii CCBAU114, Sinorhizobium fredii USDA 205, Trichoderma asperellum SKT-1, Trichoderma asperellum ICC 012, Trichoderma atroviride LC52, Trichoderma atroviride CNCM 1-1237, Trichoderma fertile JM41R, Trichoderma gamsii ICC 080, Trichoderma hamatum ATCC 52198, Trichoderma harzianum ATCC 52445, Trichoderma harzianum KRL-AG2, Trichoderma harzianum T-22, Trichoderma harzianum TH-35, Trichoderma harzianum T-39, Trichoderma harzianum ICC012, Trichoderma reesi ATCC 28217, Trichoderma virens ATCC 58678, Trichoderma virens Gl-3, Trichoderma virens GL-21, Trichoderma virens G-41, Trichoderma viridae ATCC 52440, Trichoderma viridae ICC080, Trichoderma viridae TV1, Yersinia entomophaga strain O43NEW (NRRL B-67598), Yersinia entomophaga strain O24G3R (NRRL B-67599), Yersinia entomophaga strain O24KEK (NRRL B-67600) and Yersinia entomophaga strain O333A4 (NRRL B-67601).

[1121] Non-limiting examples of microbial compositions that may be incorporated into formulations of the present disclosure—or into which proteins and other compositions of the present disclosure may be incorporated—include, but are not limited to, commercial products sold under the tradenames SERIFEL® from BASF (Ludwigshafen, Germany); VITIVO® from Bayer Crop Science (Creve Coeur, MO, USA); BIONIQ®, CELL-TECH®, JUMPSTART®, NITRAGIN®, OPTIMIZE®, QUICKROOTS® and TAGTEAM® from Novozymes North America, Inc. (Durham, NC, USA).

[1122] Examples of nutrients that may be included in formulations of the present disclosure include, but not are not limited to, organic acids (e.g., acetic acid, citric acid, lactic acid, malic acid, taurine, etc.), macrominerals (e.g., phosphorous, calcium, magnesium, potassium, sodium, iron, etc.), trace minerals (e.g., boron, cobalt, chloride, chromium, copper, fluoride, iodine, manganese, molybdenum, selenium, zinc, etc.), vitamins, (e.g., vitamin A, vitamin B complex (i.e., vitamin B₁, vitamin B₂, vitamin B₃, vitamin B₅, vitamin B₆, vitamin B₇, vitamin B₈, vitamin B₉, vitamin B₁₂, choline) vitamin C, vitamin D, vitamin E, vitamin K, carotenoids (α-carotene, β-carotene, cryptoxanthin, lutein, lycopene, zeaxanthin, etc.), and combinations thereof. See also, generally, e.g., US 2014/235447; WO 2022/029224; WO 2022/029221; WO 2021/255118; WO 2021/247915; US 2021/300837; US 2020/148605; US 2012/247164; US 2016/355443; US 2020/055794; US 2011/154873; US 2006/243009; US 2017/088474.

[1123] Examples of pest attractants and feeding stimulants that may be included in formulations of the present disclosure include, but not are not limited to, brevicomin, ceralure, codlelure, cue-lure, disparlure, dominicalure, eugenol, frontalin, gossyplure, grandlure, hexalure, ipsdienol, ipsenol, japonilure, latitlure, lineatin, litlure, looplure, medlure, megatomic acid, methyl eugenol, moguchun, α-multistriatin, muscalure, orfalure, oryctalure, ostramone, rescalure, siglure, sulcatol, trimedlure, trunc-call, and combinations thereof. See generally, e.g., WO 00/28824; U.S. Pat. Nos. 5,607,684; 4,510,133; 5,290,556; U.S. 60/774,634; U.S. Pat. No. 6,773,727; WO 2022/051661; EP 0563963; WO 2013/164384; WO 2003/020030; U.S. Pat. Nos. 8,420,070; 5,401,506; WO 92/11856.

[1124] Examples of postharvest treatments that may be included in formulations of the present disclosure include, but not are not limited to, essential oils, ethylene biosynthesis inhibitors (e.g., cyclopropenes), pesticides and waxes. See generally, e.g., WO 00/10386; WO 01/43548; US 2002/058592; US 2002/061822; US 2002/043730; US 2002/198107; US 2004/072694; US 2003/100450; US 2004/077502; US 2005/043179; US 2005/250649; US 2005/261131; US 2005/261132; US 2005/288189; CA 2512254; CA 2512256; US 2007/117720; US 2007/265166; US 2008/113867; US 2010/144533; US 2008/206823; US 2009/035380; US2009/077684; US 2009/118492; US 2009/230350; US 2010/047408; US 2011/321191; US 2011/034335; US 2011/014334; US 2012/272572; US 2012/282380; US2011/293801; US2012/004108; US2013/065764; US2012/258220; US2012/142534; US 2014/127309; US 2013/004634; US 2014/011679; US 2015/208679; WO 2014/120715; WO 2015/175157; WO 2017/180695; US 2014/080710; US 2015/237877; US 2015/272115; US 2016/000072; US 2015/366189; US 2014/242235; US 2014/271758; US 2016/066568; US 2016/095311; US 2015/018430; US 2015/087520; US 2015/231588; US 2015/366230; US 2016/235070; US 2016/324147; US 2017/251673; US 2017/251662; US 2017/251669; US 2017/265462; US 2017/318804; US 2018/139975; US 2018/356384; US 2021/102245; US 2021/238201; WO 2022/094214; EP 2468107; ES 2439616; WO 2014/128321; WO 2018/116027; WO 2018/128807; WO 2019/058211; WO 2020/157714; US 2009/253578; US 2009/253579; US 2004/146617; US 2022/087261; WO 2020/016728; US 2010/173773; US 2010/292080; U.S. Pat. No. 5,858,436; EP 0972450; U.S. Pat. Nos. 6,221,414; 6,723,364; WO 00/49880; U.S. Pat. No. 6,403,139; US 2005/129662; US 2006/228458; US 2005/137090; US 2006/276336; US 2008/175926; US 2008/016766; US 2008/145499; US 2010/092631; US 2010/081636; US 2011/003694; US 2011/008475; US 2010/298147; US 2013/072383; US 2013/156835; US 2013/266670; US 2013/236562; US 2013/178489; US 2014/187570; US 2013/306158; US 2013/341809; US 2016/330987; WO 2017/001502; US 2019/159469; WO 2017/220581; US 2020/060300; US 2020/221719; WO 2020/016154; WO 2020/225066; WO 2021/233900; WO 2005/058014.

[1125] Non-limiting examples of postharvest treatment compositions that may be incorporated into formulations of the present disclosure—or into which proteins and other compositions of the present disclosure may be incorporated—include commercial products sold under the tradenames ACTISEAL™, ETHYLBLOC, FRESHSTART, SMARTCITRUS, TEYCER, VITAFRESH from AgroFresh, Inc. (Philadelphia, PA, USA); CERAXEL®, CERASULFUR®, CERAQUINT®, ELIM®, MUSACARE® and CERAFRUTA from CERADIS Crop Protection (Ceradis B.V., Netherlands); APL-LUSTR®, APL-BRITE, BIO-SAVE®, CITRUBLUSH, CITRUS BRITE, CITRUS FIX™, CITRUS LUSTR®, DECCO and DECCONATUR™ from Decco U.S. Post-Harvest, Inc. (Monrovia, CA, USA); SEMPERFRESH, LUSTRE DRY, NATURAL SHINE®, PACRITE®, PRIMAFRESH®, SHIELD-BRITE®, EFOG® and XEDAQUIN from Pace International (Wapato, WA, USA); ALUMNI®, CHAIRMAN®, GRADUATE®, GRADUATEA+®, MENTOR®, MERTECT®, SCHOLAR® and STADIUM® from Syngenta Crop Protection (Basel, Switzerland); and MAGNAPHOS, QUICKPHLO-R, QUICKPHOS from UPL Limited (Mumbai, Maharashtra, India).

[1126] It is to be understood that many of the compounds described above as “chemical actives” and “chemical active compositions” may be applied to plants and plant parts both preharvest and postharvest and may therefore also be considered “postharvest treatments” and “postharvest treatment compositions.”

[1127] Examples of suitable UV protectants include, but not are not limited to, aromatic amino acids (e.g., tryptophan, tyrosine), carotenoids, cinnamates, lignosulfonates (e.g., calcium lignosulfonate, sodium lignosulfonate), melanins, mycosporines, polyphenols and/or salicylates). Non-limiting examples of UV protectants include Borregaard LignoTech™ lignosulfonates (e.g., Borresperse 3A, Borresperse CA, Borresperse NA, Marasperse AG, Norlig A, Norlig I1D, Ufoxane 3A, Ultrazine NA, Vanisperse CB; Borregaard Lignotech, Sarpsborg, Norway) and combinations thereof. Additional examples of UV protectants may be found in BURGES, FORMULATION OF MICROBIAL BIOPESTICIDES: BENEFICIAL MICROORGANISMS, NEMATODES AND SEED TREATMENTS (Springer Science & Business Media) (2012).

[1128] Examples of suitable wetting agents include, but are not limited to, naphthalene sulfonates, such as alkyl naphthalene sulfonates (e.g., sodium alkyl naphthalene sulfonate), isopropyl naphthalene sulfonates (e.g., sodium isopropyl naphthalene sulfonate) and butyl naphthalene sulfonates (e.g., sodium n-butyl naphthalene sulfonate).

[1129] It is to be understood that formulations of the present disclosure may comprise combinations of the enzymes, including, but not limited to combinations of enzymes expressly disclosed herein and combinations with enzymes that are not expressly disclosed herein.

[1130] In some embodiments, formulations of the present disclosure comprise 2, 3, 4, 5, 6, 7, 8, 9, 10 or more proteins of the present disclosure. For example, in some embodiments, formulations of the present disclosure comprise 2, 3, 4, 5, 6, 7, 8, 9, 10 or more of the polypeptides set forth herein as SEQ ID Nos: 1-48 and 98-150 or a mature polypeptide thereof.

[1131] It is to be understood that formulations of the present disclosure may comprise one or more filler and/or carrier materials to increase the volume and improve the handleability of the formulations. Suitable filler or carrier materials for granule/particle formulations include, but are not limited to, various salts of carbonate, chloride, silicate and sulfate, as well as talc, clay and the like. Suitable filler or carrier materials for liquid formulation include, but are not limited to, water or low molecular weight primary and secondary alcohols including polyols and diols. Examples of such alcohols include, but are not limited to, methanol, ethanol, propanol and isopropanol. In some embodiments, formulations of the present disclosure comprise about 5% to about 90% w/w of such filler/carrier materials.

[1132] In some preferred embodiments, formulations of the present disclosure, comprise, consist essentially of or consist of:
[1133] a) about 0.0001 to about 25% w/w protein (e.g., one or more proteins of the present disclosure), more preferably about 0.0001 to about 5% w/w, even more preferably about 0.001 to about 1% w/w;
[1134] b) about 25 to about 75% w/w enzyme stabilizer (e.g., one or more polyols, such as glycerol and/or sorbitol), more preferably about 25 to about 50% w/w, even more preferably about 35 to about 45% w/w;
[1135] c) about 0.001 to about 1% w/w preservative (e.g., potassium sorbate and/or sodium benzoate), more preferably about 0.01 to about 1% w/w, even more preferably 0.1 to about 0.5%; and
[1136] d) water.

[1137] In some preferred embodiments, formulations of the present disclosure, comprise, consist essentially of or consist of:
[1138] a) about 0.0001 to about 25% w/w protein (e.g., one or more proteins of the present disclosure), more preferably about 0.0001 to about 5% w/w, even more preferably about 0.001 to about 1% w/w;
[1139] b) about 0.001 to about 1% w/w preservative (e.g., potassium sorbate and/or sodium benzoate), more preferably about 0.01 to about 1% w/w, even more preferably 0.1 to about 0.5%; and
[1140] c) water.

[1141] In some preferred embodiments, formulations of the present disclosure, comprise, consist essentially of or consist of:
[1142] a) about 0.0001 to about 25% w/w protein (e.g., one or more proteins of the present disclosure), more preferably about 0.0001 to about 5% w/w, even more preferably about 0.001 to about 1% w/w;
[1143] b) about 25 to about 75% w/w enzyme stabilizer (e.g., one or more polyols, such as glycerol and/or sorbitol), more preferably about 25 to about 50% w/w, even more preferably about 35 to about 45% w/w; and
[1144] c) water.

[1145] In some preferred embodiments, formulations of the present disclosure, comprise, consist essentially of or consist of:
[1146] a) about 0.0001 to about 5% w/w protein (e.g., one or more proteins of the present disclosure), more preferably about 0.0001 to about 1% w/w, even more preferably about 0.0001 to about 0.5% w/w;
[1147] b) about 0.001 to about 10% w/w rain fastener (e.g., one or more organo-modified siloxanes, such as organo-modified trisiloxanes and organo-modified polysiloxanes), more preferably about 0.025 to about 1% w/w, even more preferably about 0.025 to about 0.5% w/w;
[1148] c) about 0.001 to about 5% w/w pH control component (e.g., one or more acetate, carbonate, citrate and/or phosphate buffers), more preferably about 0.01 to about 1% w/w, even more preferably 0.05 to about 0.5%; and
[1149] d) water.

[1150] In some preferred embodiments, formulations of the present disclosure, comprise, consist essentially of or consist of:
[1151] a) about 0.0001 to about 5% w/w protein (e.g., one or more proteins of the present disclosure), more preferably about 0.0001 to about 1% w/w, even more preferably about 0.0001 to about 0.5% w/w;
[1152] b) about 0.001 to about 10% w/w rain fastener (e.g., one or more organo-modified siloxanes, such as organo-modified trisiloxanes and organo-modified polysiloxanes), more preferably about 0.025 to about 1% w/w, even more preferably about 0.025 to about 0.5% w/w;
[1153] c) about 0.001 to about 5% w/w pH control component (e.g., one or more acetate, carbonate, citrate and/or phosphate buffers), more preferably about 0.01 to about 1% w/w, even more preferably 0.05 to about 0.5%;
[1154] d) about 1 to about 5% w/w enzyme stabilizer (e.g., one or more polyols, such as glycerol and/or sorbitol), more preferably about 1 to about 2.5% w/w, even more preferably about 1 to about 2% w/w; and
[1155] e) water.

[1156] As demonstrated in the Examples set forth below, combinations of enzymes may be particularly useful for preventing, treating, suppressing, eliminating and/or reducing the severity of infestations/infections of/by horticultural pests, such as acarids, bacteria, fungi, gastropods, insects, nematodes, oomycetes, protozoa and weeds.

[1157] In some embodiments, formulations of the present disclosure comprise two or more distinct cellulases.

[1158] In some embodiments, formulations of the present disclosure comprise two or more distinct glucanases.

[1159] In some embodiments, formulations of the present disclosure comprise two or more distinct hemicellulases.

[1160] In some embodiments, formulations of the present disclosure comprise two or more distinct pectinases.

[1161] In some embodiments, formulations of the present disclosure comprise two or more distinct peptidases.

[1162] In some embodiments, formulations of the present disclosure comprise two or more distinct proteases.

[1163] In some embodiments, formulations of the present disclosure comprise two or more distinct xylanases.

[1164] In some embodiments, formulations of the present disclosure comprise at least one cellulase and at least one hemicellulase.

[1165] In some embodiments, formulations of the present disclosure comprise at least one amylase, at least one glucanase, and at least one bacillolycin.

[1166] In some embodiments, formulations of the present disclosure comprise at least one cellulase, at least one hemicellulase, and at least one xylanase.

[1167] In some embodiments, formulations of the present disclosure comprise at least one cellulase, at least one glucanase, and at least one pectinase.

[1168] In some embodiments, formulations of the present disclosure comprise at least one cellulase, at least one glucanase, and at least one xylanase.

[1169] In some embodiments, formulations of the present disclosure comprise at least one cellulase and at least one xylanase.

[1170] In some embodiments, formulations of the present disclosure comprise at least one furanosidase and at least one xylanase.

[1171] In some embodiments, formulations of the present disclosure comprise at least one hemicellulase and at least one xylanase.

[1172] In some embodiments, formulations of the present disclosure comprise at least one peptidase and at least one protease.

[1173] In some embodiments, formulations of the present disclosure comprise a fermentation broth that comprises 2, 3, 4, 5, 6, 7, 8, 9, 10 or more enzymes.

[1174] In some embodiments, formulations of the present disclosure comprise a fermentation broth that comprises 2, 3, 4, 5, 6, 7, 8, 9, 10 or more proteins of the present disclosure.

[1175] The present disclosure also provides polynucleotides encoding proteins of the present disclosure, including, but not limited to, nucleic acid constructs, recombinant expression vectors and recombinant host cells that encode one or more enzymes of the present disclosure, as well as methods of producing such polynucleotides.

[1176] The polynucleotide may be a genomic DNA, a cDNA, a synthetic DNA, a synthetic RNA, a mRNA, or a combination thereof.

[1177] The polynucleotide may be cloned from any suitable genus, species or strain.

[1178] In some embodiments, the protein is cloned from a Gram-negative bacteria, such as Campylobacter, Dicytoglomus (e.g., D. thermophilum), Escherichia (e.g., E. coli), Flavobacterium, Fusobacterium, Helicobacter, Ilyobacter, Neisseria, Pseudomonas, Salmonella or Ureaplasma.

[1179] In some embodiments, the polynucleotide is cloned from a Gram-positive bacteria, such as Bacillus (e.g., B. agaradhaerens, Bacillus alkalophilus, Bacillus amyloliquefaciens, Bacillus brevis, Bacillus circulans, Bacillus clausii, Bacillus coagulans, B. deramificans, Bacillus firmus, Bacillus lautus, Bacillus lentus, Bacillus licheniformis, Bacillus megaterium, Bacillus pumilus, Bacillus stearothermophilus, Bacillus subtilis, Bacillus thuringiensis), Clostridium, Enterococcus, Geobacillus, Lactobacillus, Lactococcus, Oceanobacillus (e.g., O. barbara), Staphylococcus, Streptococcus (e.g., Streptococcus equisimilis, Streptococcus pyogenes, Streptococcus uberis, and Streptococcus equi subsp. Zooepidemicus) or Streptomyces (e.g., Streptomyces achromogenes, Streptomyces avermitilis, Streptomyces coelicolor, Streptomyces griseus, Streptomyces lividans).

[1180] In some embodiments, the polynucleotide is cloned from a fungus, such as Acremonium, Aspergillus (e.g., A. aculeatus, Aspergillus awamori, Aspergillus foetidus, Aspergillus fumigatus, Aspergillus japonicus, Aspergillus nidulans, Aspergillus niger, Aspergillus oryzae), Aureobasidium, Bjerkandera (e.g., Bjerkandera adusta), Ceriporiopsis (e.g., Ceriporiopsis aneirina, Ceriporiopsis caregiea, Ceriporiopsis gilvescens, Ceriporiopsis pannocinta, Ceriporiopsis rivulosa, Ceriporiopsis subrufa, Ceriporiopsis subvermispora), Chaetomium (e.g., C. erraticum), Chrysosporium (e.g., Chrysosporium inops, Chrysosporium keratinophilum, Chrysosporium lucknowense, Chrysosporium merdarium, Chrysosporium pannicola, Chrysosporium queenslandicum, Chrysosporium tropicum, Chrysosporium zonatum), Coprinus (e.g., Coprinus cinereus), Coriolus (e.g., Coriolus hirsutus), Cryptococcus, Filibasidium, Fusarium (e.g., Fusarium bactridioides, Fusarium cerealis, Fusarium crookwellense, Fusarium culmorum, Fusarium graminearum, Fusarium graminum, Fusarium heterosporum, Fusarium negundi, Fusarium oxysporum, Fusarium reticulatum, Fusarium roseum, Fusarium sambucinum, Fusarium sarcochroum, F. solani, Fusarium sporotrichioides, Fusarium sulphureum, Fusarium torulosum, Fusarium trichothecioides, Fusarium venenatum), Humicola (e.g., Humicola insolens, Humicola lanuginosa), Magnaporthe, Microdochium (e.g., M. nivale), Mucor (e.g., Mucor miehei), Myceliophthora (e.g., Myceliophthora thermophila), Neocallimastix, Neurospora (e.g., Neurospora crassa), Paecilomyces, Penicillium (e.g., Penicillium purpurogenum), Phanerochaete (e.g., Phanerochaete chrysosporium), Phlebia (e.g., Phlebia radiata), Piromyces, Pleurotus (e.g., Pleurotus eryngii), Schizophyllum, Talaromyces (e.g., Talaromyces emersonii), Thermoascus (e.g., T. aurantiacus), Thielavia (e.g., Thielavia terrestris), Tolypocladium, Trametes (e.g., Trametes villosa, Trametes versicolor), or Trichoderma (e.g., T. atroviride, Trichoderma harzianum, Trichoderma koningii, Trichoderma longibrachiatum, Trichoderma reesei, Trichoderma viride).

[1181] In some embodiments, the polynucleotide is cloned from a yeast, such as Candida, Hansenula, Kluyveromyces (e.g., Kluyveromyces lactis), Pichia, Saccharomyces (e.g., Saccharomyces carlsbergensis, Saccharomyces cerevisiae, Saccharomyces diastaticus, Saccharomyces douglasii, Saccharomyces kluyveri, Saccharomyces norbensis, Saccharomyces oviformis), Schizosaccharomyces, or Yarrowia (e.g., Yarrowia lipolytica).

[1182] In some embodiments, the polynucleotide encodes:
[1183] a) a polypeptide having about/at least 60, 61, 62, 63, 64, 65, 66, 67, 68, 69, 70, 71, 72, 73, 74, 75, 76, 77, 78, 79, 80, 81, 82, 83, 84, 85, 86, 87, 88, 89, 90, 91, 92, 93, 94, 95, 96, 97, 98, 99 or 100% sequence identity to any one or more of SEQ ID NOs: 1-48 and 98-150;
[1184] b) a polypeptide having about/at least 60, 61, 62, 63, 64, 65, 66, 67, 68, 69, 70, 71, 72, 73, 74, 75, 76, 77, 78, 79, 80, 81, 82, 83, 84, 85, 86, 87, 88, 89, 90, 91, 92, 93, 94, 95, 96, 97, 98, 99 or 100% sequence identity to a mature polypeptide of any one or more of SEQ ID NOs: 1-48 and 98-150;
[1185] c) a polypeptide derived from any one of SEQ ID NOs: 1-48 and 98-150 by substitution, deletion or insertion of one or more amino acids;
[1186] e) a polypeptide derived from a mature polypeptide any one of SEQ ID NOs: 1-48 and 98-150 by substitution, deletion or insertion of one or more amino acids;
[1187] f) a polypeptide derived from the polypeptide of any one of a) through e) wherein the N- and/or C-terminal end has been extended by the addition of one or more amino acids; and/or
[1188] g) a fragment of the polypeptide of any one of a) through f).

[1189] In preferred embodiments, the polynucleotide encodes a polypeptide that comprises, consists essentially of or consists of the amino acid sequence of any one of SEQ ID NOs: 1-48 and 98-150 or a mature polypeptide thereof.

[1190] In some embodiments, the polynucleotide comprises, consists essentially of or consists of a nucleic acid sequence having about/at least 60, 61, 62, 63, 64, 65, 66, 67, 68, 69, 70, 71, 72, 73, 74, 75, 76, 77, 78, 79, 80, 81, 82, 83, 84, 85, 86, 87, 88, 89, 90, 91, 92, 93, 94, 95, 96, 97, 98, 99 or 100% sequence identity to any one or more of SEQ ID NOs: 49-97 and 151-203 or the cDNA sequence thereof; In preferred embodiments, the polynucleotide comprises, consists essentially of or consists of the nucleic acid sequence of any one of SEQ ID NOs: 49-97 and 151-203 or a cDNA sequence thereof.

[1191] In some embodiments, the polynucleotide encodes a polypeptide that comprises, consists essentially of or consists of a fragment of one of SEQ ID NOs: 1-48 and 98-150 or a mature peptide thereof. For example, the polynucleotide may encode a fragment of any one of SEQ ID NOs: 1-48 and 98-150 or a mature peptide thereof, said fragment comprising at least 85, 86, 87, 88, 89, 90, 91, 92, 93, 94, 95, 96, 97, 98 or 99% of the amino acids found in the original protein.

[1192] In some embodiments, polynucleotides of the present disclosure encode a polypeptide that comprises, consists essentially of or consists of any one of SEQ ID NOs: 1-48 and 98-150 or a mature polypeptide thereof with an N-terminal extension of one or more amino acids (e.g., 1, 2, 3, 4, 5, 6, 7, 8, 9, 10, 11, 12, 13, 14, 15, 16, 17, 18, 19, 20 or more amino acids), a C-terminal extension of one or more amino acids (e.g., 1, 2, 3, 4, 5, 6, 7, 8, 9, 10, 11, 12, 13, 14, 15, 16, 17, 18, 19, 20 or more amino acids), one or more substitutions (e.g., 1, 2, 3, 4, 5, 6, 7, 8, 9, 10, 11, 12, 13, 14, 15, 16, 17, 18, 19, 20 or more substitutions), one or more insertions (e.g., 1, 2, 3, 4, 5, 6, 7, 8, 9, 10, 11, 12, 13, 14, 15, 16, 17, 18, 19, 20 or more insertions), and/or one or more deletions (e.g., 1, 2, 3, 4, 5, 6, 7, 8, 9, 10, 11, 12, 13, 14, 15, 16, 17, 18, 19, 20 or more deletions). The amino acid changes may be of a minor nature, that is conservative amino acid substitutions or insertions that do not significantly affect the folding and/or activity of the protein; small deletions, typically of 1-30 amino acids; small amino- or carboxyl-terminal extensions, such as an amino-terminal methionine residue; a small linker peptide of up to 20-25 residues; or a small extension that facilitates purification by changing net charge or another function, such as a poly-histidine tract, an antigenic epitope or a binding module.

[1193] Polynucleotides of the present disclosure may be mutated by introduction of nucleotide substitutions that do not result in a change in the amino acid sequence of the protein, but which correspond to the codon usage of the host organism intended for production of the enzyme, or by introduction of nucleotide substitutions that may give rise to a different amino acid sequence. For a general description of nucleotide substitution, see, e.g., Ford et al., 1991, Protein Expression and Purification 2: 95-107.

[1194] In an aspect, the polynucleotide is isolated.

[1195] In another aspect, the polynucleotide is purified.

[1196] The present disclosure also relates to nucleic acid constructs comprising a polynucleotide of the present disclosure, wherein the polynucleotide is operably linked to one or more control sequences that direct the expression of the coding sequence in a suitable host cell under conditions compatible with the control sequences.

[1197] The polynucleotide may be manipulated in a variety of ways to provide for expression of the protein. Manipulation of the polynucleotide prior to its insertion into a vector may be desirable or necessary depending on the expression vector.

[1198] Techniques for modifying polynucleotides utilizing recombinant DNA methods are well known in the art.

[1199] The control sequence may be a promoter, a polynucleotide that is recognized by a host cell for expression of a polynucleotide encoding a protein of the present disclosure. The promoter contains transcriptional control sequences that mediate the expression of the protein. The promoter may be any polynucleotide that shows transcriptional activity in the host cell including mutant, truncated, and hybrid promoters, and may be obtained from genes encoding extracellular or intracellular proteins either homologous or heterologous to the host cell.

[1200] Examples of suitable promoters for directing transcription of the polynucleotide of the present disclosure in a bacterial host cell are described in Sambrook et al., 1989, Molecular Cloning: A Laboratory Manual, Cold Spring Harbor Lab., NY, Davis et al., 2012, supra, and Song et al., 2016, PLOS One 11(7): e0158447.

[1201] Examples of suitable promoters for directing transcription of the polynucleotide of the present disclosure in a filamentous fungal host cell are promoters obtained from Aspergillus, Fusarium, Rhizomucor and Trichoderma cells, such as the promoters described in Mukherjee et al., 2013, “Trichoderma: Biology and Applications”, and by Schmoll and Dattenböck, 2016, “Gene Expression Systems in Fungi: Advancements and Applications”, Fungal Biology.

[1202] For expression in a yeast host, examples of useful promoters are described by Smolke et al., 2018, “Synthetic Biology: Parts, Devices and Applications” (Chapter 6: Constitutive and Regulated Promoters in Yeast: How to Design and Make Use of Promoters in S. cerevisiae), and by Schmoll and Dattenböck, 2016, “Gene Expression Systems in Fungi: Advancements and Applications”, Fungal Biology.

[1203] The control sequence may also be a transcription terminator, which is recognized by a host cell to terminate transcription. The terminator is operably linked to the 3′-terminus of the polynucleotide encoding the protein. Any terminator that is functional in the host cell may be used in the present disclosure.

[1204] Preferred terminators for bacterial host cells may be obtained from the genes for Bacillus clausii alkaline protease (aprH), Bacillus licheniformis alpha-amylase (amyL), and Escherichia coli ribosomal RNA (rrnB).

[1205] Preferred terminators for filamentous fungal host cells may be obtained from Aspergillus or Trichoderma species, such as obtained from the genes for Aspergillus niger glucoamylase, Trichoderma reesei beta-glucosidase, Trichoderma reesei cellobiohydrolase I, and Trichoderma reesei endoglucanase I, such as the terminators described in Mukherjee et al., 2013, “Trichoderma: Biology and Applications”, and by Schmoll and Dattenböck, 2016, “Gene Expression Systems in Fungi: Advancements and Applications”, Fungal Biology.

[1206] Preferred terminators for yeast host cells may be obtained from the genes for Saccharomyces cerevisiae enolase, Saccharomyces cerevisiae cytochrome C (CYC1), and Saccharomyces cerevisiae glyceraldehyde-3-phosphate dehydrogenase. Other useful terminators for yeast host cells are described by Romanos et al., 1992, Yeast 8: 423-488.

[1207] The control sequence may also be an mRNA stabilizer region downstream of a promoter and upstream of the coding sequence of a gene which increases expression of the gene.

[1208] Examples of suitable mRNA stabilizer regions are obtained from a Bacillus thuringiensis cryIIIA gene (WO 94/25612) and a Bacillus subtilis SP82 gene (Hue et al., 1995, J. Bacteriol. 177: 3465-3471).

[1209] Examples of mRNA stabilizer regions for fungal cells are described in Geisberg et al., 2014, Cell 156(4): 812-824, and in Morozov et al., 2006, Eukaryotic Cell 5(11): 1838-1846.

[1210] The control sequence may also be a leader, a non-translated region of an mRNA that is important for translation by the host cell. The leader is operably linked to the 5′-terminus of the polynucleotide encoding the protein. Any leader that is functional in the host cell may be used.

[1211] Suitable leaders for bacterial host cells are described by Hambraeus et al., 2000, Microbiology 146(12): 3051-3059, and by Kaberdin and Blasi, 2006, FEMS Microbiol. Rev. 30(6): 967-979.

[1212] Preferred leaders for filamentous fungal host cells may be obtained from the genes for Aspergillus oryzae TAKA amylase and Aspergillus nidulans triose phosphate isomerase.

[1213] Suitable leaders for yeast host cells may be obtained from the genes for Saccharomyces cerevisiae enolase (ENO-1), Saccharomyces cerevisiae 3-phosphoglycerate kinase, Saccharomyces cerevisiae alpha-factor, and Saccharomyces cerevisiae alcohol dehydrogenase/glyceraldehyde-3-phosphate dehydrogenase (ADH2/GAP).

[1214] The control sequence may also be a polyadenylation sequence, a sequence operably linked to the 3′-terminus of the polynucleotide which, when transcribed, is recognized by the host cell as a signal to add polyadenosine residues to transcribed mRNA. Any polyadenylation sequence that is functional in the host cell may be used.

[1215] Preferred polyadenylation sequences for filamentous fungal host cells are obtained from the genes for Aspergillus nidulans anthranilate synthase, Aspergillus niger glucoamylase, Aspergillus niger alpha-glucosidase, Aspergillus oryzae TAKA amylase, and Fusarium oxysporum trypsin-like protease.

[1216] Useful polyadenylation sequences for yeast host cells are described by Guo and Sherman, 1995, Mol. Cellular Biol. 15: 5983-5990.

[1217] The control sequence may also be a signal peptide coding region that encodes a signal peptide linked to the N-terminus of a protein and directs the protein into the cell's secretory pathway. The 5′-end of the coding sequence of the polynucleotide may inherently contain a signal peptide coding sequence naturally linked in translation reading frame with the segment of the coding sequence that encodes the protein. Alternatively, the 5′-end of the coding sequence may contain a signal peptide coding sequence that is heterologous to the coding sequence. A heterologous signal peptide coding sequence may be required where the coding sequence does not naturally contain a signal peptide coding sequence.

[1218] Alternatively, a heterologous signal peptide coding sequence may simply replace the natural signal peptide coding sequence to enhance secretion of the protein. Any signal peptide coding sequence that directs the expressed protein into the secretory pathway of a host cell may be used.

[1219] Effective signal peptide coding sequences for bacterial host cells are the signal peptide coding sequences obtained from the genes for Bacillus NCIB 11837 maltogenic amylase, Bacillus licheniformis subtilisin, Bacillus licheniformis beta-lactamase, Bacillus stearothermophilus alpha-amylase, Bacillus stearothermophilus neutral proteases (nprT, nprS, nprM), and Bacillus subtilis prsA. Further signal peptides are described by Freudl, 2018, Microbial Cell Factories 17: 52.

[1220] Effective signal peptide coding sequences for filamentous fungal host cells are the signal peptide coding sequences obtained from the genes for Aspergillus niger neutral amylase, Aspergillus niger glucoamylase, Aspergillus oryzae TAKA amylase, Humicola insolens cellulase, Humicola insolens endoglucanase V, Humicola lanuginosa lipase, and Rhizomucor miehei aspartic proteinase, such as the signal peptide described by Xu et al., 2018, Biotechnology Letters 40: 949-955 Useful signal peptides for yeast host cells are obtained from the genes for Saccharomyces cerevisiae alpha-factor and Saccharomyces cerevisiae invertase. Other useful signal peptide coding sequences are described by Romanos et al., 1992, supra.

[1221] The control sequence may also be a propeptide coding sequence that encodes a propeptide positioned at the N-terminus of a protein. The resultant protein is known as a proenzyme or proprotein (or a zymogen in some cases). A proprotein is generally inactive and can be converted to an active protein by catalytic or autocatalytic cleavage of the propeptide from the proprotein. The propeptide coding sequence may be obtained from the genes for Bacillus subtilis alkaline protease (aprE), Bacillus subtilis neutral protease (nprT), Myceliophthora thermophila laccase (WO 95/33836), Rhizomucor miehei aspartic proteinase, and Saccharomyces cerevisiae alpha-factor.

[1222] Where both signal peptide and propeptide sequences are present, the propeptide sequence is positioned next to the N-terminus of a protein and the signal peptide sequence is positioned next to the N-terminus of the propeptide sequence. Additionally or alternatively, when both signal peptide and propeptide sequences are present, the protein may comprise only a part of the signal peptide sequence and/or only a part of the propeptide sequence. Alternatively, the final or isolated protein may comprise a mixture of mature proteins and proteins which comprise, either partly or in full length, a propeptide sequence and/or a signal peptide sequence.

[1223] It may also be desirable to add regulatory sequences that regulate expression of the protein relative to the growth of the host cell. Examples of regulatory sequences are those that cause expression of the gene to be turned on or off in response to a chemical or physical stimulus, including the presence of a regulatory compound. Regulatory sequences in prokaryotic systems include the lac, tac, and trp operator systems. In yeast, the ADH2 system or GAL1 system may be used. In filamentous fungi, the Aspergillus niger glucoamylase promoter, Aspergillus oryzae TAKA alpha-amylase promoter, and Aspergillus oryzae glucoamylase promoter, Trichoderma reesei cellobiohydrolase I promoter, and Trichoderma reesei cellobiohydrolase II promoter may be used. Other examples of regulatory sequences are those that allow for gene amplification. In fungal systems, these regulatory sequences include the dihydrofolate reductase gene that is amplified in the presence of methotrexate, and the metallothionein genes that are amplified with heavy metals.

[1224] The control sequence may also be a transcription factor, a polynucleotide encoding a polynucleotide-specific DNA-binding protein that controls the rate of the transcription of genetic information from DNA to mRNA by binding to a specific polynucleotide sequence. The transcription factor may function alone and/or together with one or more other proteins or transcription factors in a complex by promoting or blocking the recruitment of RNA polymerase. Transcription factors are characterized by comprising at least one DNA-binding domain which often attaches to a specific DNA sequence adjacent to the genetic elements which are regulated by the transcription factor. The transcription factor may regulate the expression of a protein of interest either directly, i.e., by activating the transcription of the gene encoding the protein of interest by binding to its promoter, or indirectly, i.e., by activating the transcription of a further transcription factor which regulates the transcription of the gene encoding the protein of interest, such as by binding to the promoter of the further transcription factor. Suitable transcription factors for fungal host cells are described in WO 2017/144177. Suitable transcription factors for prokaryotic host cells are described in Seshasayee et al., 2011, Subcellular Biochemistry 52: 7-23, as well in Balleza et al., 2009, FEMS Microbiol. Rev. 33(1): 133-151.

[1225] The present disclosure also relates to recombinant expression vectors comprising a polynucleotide of the present disclosure, a promoter, and transcriptional and translational stop signals. The various nucleotide and control sequences may be joined together to produce a recombinant expression vector that may include one or more convenient restriction sites to allow for insertion or substitution of the polynucleotide encoding the protein at such sites. Alternatively, the polynucleotide may be expressed by inserting the polynucleotide or a nucleic acid construct comprising the polynucleotide into an appropriate vector for expression. In creating the expression vector, the coding sequence is located in the vector so that the coding sequence is operably linked with the appropriate control sequences for expression.

[1226] The recombinant expression vector may be any vector (e.g., a plasmid or virus) that can be conveniently subjected to recombinant DNA procedures and can bring about expression of the polynucleotide. The choice of the vector will typically depend on the compatibility of the vector with the host cell into which the vector is to be introduced. The vector may be a linear or closed circular plasmid.

[1227] The vector may be an autonomously replicating vector, i.e., a vector that exists as an extrachromosomal entity, the replication of which is independent of chromosomal replication, e.g., a plasmid, an extrachromosomal element, a minichromosome, or an artificial chromosome. The vector may contain any means for assuring self-replication. Alternatively, the vector may be one that, when introduced into the host cell, is integrated into the genome and replicated together with the chromosome(s) into which it has been integrated. Furthermore, a single vector or plasmid or two or more vectors or plasmids that together contain the total DNA to be introduced into the genome of the host cell, or a transposon, may be used.

[1228] The vector preferably contains one or more selectable markers that permit easy selection of transformed, transfected, transduced, or the like cells. A selectable marker is a gene the product of which provides for biocide or viral resistance, resistance to heavy metals, prototrophy to auxotrophs, and the like.

[1229] The vector preferably contains at least one element that permits integration of the vector into the host cell's genome or autonomous replication of the vector in the cell independent of the genome.

[1230] For integration into the host cell genome, the vector may rely on the polynucleotide's sequence encoding the protein or any other element of the vector for integration into the genome by homologous recombination, such as homology-directed repair (HDR), or non-homologous recombination, such as non-homologous end-joining (NHEJ).

[1231] For autonomous replication, the vector may further comprise an origin of replication enabling the vector to replicate autonomously in the host cell in question. The origin of replication may be any plasmid replicator mediating autonomous replication that functions in a cell. The term “origin of replication” or “plasmid replicator” means a polynucleotide that enables a plasmid or vector to replicate in vivo.

[1232] More than one copy of a polynucleotide of the present disclosure may be inserted into a host cell to increase production of a protein. For example, 2 or 3 or 4 or 5 or more copies are inserted into a host cell. An increase in the copy number of the polynucleotide can be obtained by integrating at least one additional copy of the sequence into the host cell genome or by including an amplifiable selectable marker gene with the polynucleotide where cells containing amplified copies of the selectable marker gene, and thereby additional copies of the polynucleotide, can be selected for by cultivating the cells in the presence of the appropriate selectable agent.

[1233] The present disclosure also provides cells expressing one or more proteins of the present disclosure, including microorganisms that naturally express one or more enzymes of the present disclosure and microorganisms that have been engineered to express one or more enzymes of the present disclosure.

[1234] In some embodiments, the cell expresses:
[1235] a) a polypeptide having about/at least 60, 61, 62, 63, 64, 65, 66, 67, 68, 69, 70, 71, 72, 73, 74, 75, 76, 77, 78, 79, 80, 81, 82, 83, 84, 85, 86, 87, 88, 89, 90, 91, 92, 93, 94, 95, 96, 97, 98, 99 or 100% sequence identity to any one or more of SEQ ID NOs: 1-48 and 98-150;
[1236] b) a polypeptide having about/at least 60, 61, 62, 63, 64, 65, 66, 67, 68, 69, 70, 71, 72, 73, 74, 75, 76, 77, 78, 79, 80, 81, 82, 83, 84, 85, 86, 87, 88, 89, 90, 91, 92, 93, 94, 95, 96, 97, 98, 99 or 100% sequence identity to a mature polypeptide of any one or more of SEQ ID NOs: 1-48 and 98-150;
[1237] c) a polypeptide encoded by a polynucleotide having about/at least 60, 61, 62, 63, 64, 65, 66, 67, 68, 69, 70, 71, 72, 73, 74, 75, 76, 77, 78, 79, 80, 81, 82, 83, 84, 85, 86, 87, 88, 89, 90, 91, 92, 93, 94, 95, 96, 97, 98, 99 or 100% sequence identity to any one or more of SEQ ID NOs: 49-97 and 151-203 or the cDNA sequence thereof;
[1238] d) a polypeptide derived from any one of SEQ ID NOs: 1-48 and 98-150 by substitution, deletion or insertion of one or more amino acids;
[1239] e) a polypeptide derived from a mature polypeptide any one of SEQ ID NOs: 1-48 and 98-150 by substitution, deletion or insertion of one or more amino acids;
[1240] f) a polypeptide derived from the polypeptide of any one of a) through e) wherein the N- and/or C-terminal end has been extended by the addition of one or more amino acids; and/or
[1241] g) a fragment of the polypeptide of any one of a) through f).

[1242] In preferred embodiments, the cell expresses a polypeptide that comprises, consists essentially of or consists of the amino acid sequence of any one of SEQ ID NOs: 1-48 and 98-150 or a mature polypeptide thereof.

[1243] In some embodiments, the cell expresses a polypeptide that comprises, consists essentially of or consists of a fragment of one of SEQ ID NOs: 1-48 and 98-150 or a mature peptide thereof. For example, the microorganism may express a fragment of any one of SEQ ID NOs: 1-48 and 98-150 or a mature peptide thereof, said fragment comprising at least 85, 86, 87, 88, 89, 90, 91, 92, 93, 94, 95, 96, 97, 98 or 99% of the amino acids found in the original protein.

[1244] In some embodiments, the cell expresses a polypeptide that comprises, consists essentially of or consists of any one of SEQ ID NOs: 1-48 and 98-150 or a mature polypeptide thereof with an N-terminal extension of one or more amino acids (e.g., 1, 2, 3, 4, 5, 6, 7, 8, 9, 10, 11, 12, 13, 14, 15, 16, 17, 18, 19, 20 or more amino acids), a C-terminal extension of one or more amino acids (e.g., 1, 2, 3, 4, 5, 6, 7, 8, 9, 10, 11, 12, 13, 14, 15, 16, 17, 18, 19, 20 or more amino acids), one or more substitutions (e.g., 1, 2, 3, 4, 5, 6, 7, 8, 9, 10, 11, 12, 13, 14, 15, 16, 17, 18, 19, 20 or more substitutions), one or more insertions (e.g., 1, 2, 3, 4, 5, 6, 7, 8, 9, 10, 11, 12, 13, 14, 15, 16, 17, 18, 19, 20 or more insertions), and/or one or more deletions (e.g., 1, 2, 3, 4, 5, 6, 7, 8, 9, 10, 11, 12, 13, 14, 15, 16, 17, 18, 19, 20 or more deletions). The amino acid changes may be of a minor nature, that is conservative amino acid substitutions or insertions that do not significantly affect the folding and/or activity of the protein; small deletions, typically of 1-30 amino acids; small amino- or carboxyl-terminal extensions, such as an amino-terminal methionine residue; a small linker peptide of up to 20-25 residues; or a small extension that facilitates purification by changing net charge or another function, such as a poly-histidine tract, an antigenic epitope or a binding module.

[1245] In some embodiments, the cell comprises a homologous or heterologous nucleic acid sequence that is at least 60, 61, 62, 63, 64, 65, 66, 67, 68, 69, 70, 71, 72, 73, 74, 75, 76, 77, 78, 79, 80, 81, 82, 83, 84, 85, 86, 87, 88, 89, 90, 91, 92, 93, 94, 95, 96, 97, 98, 99 or 100% identical to one or more of the nucleic acid sequences set forth herein as SEQ ID Nos: 49-97 and 151-203 or the cDNA sequence thereof.

[1246] In preferred embodiments, the cell comprises a polynucleotide encodes a polypeptide that comprises, consists essentially of or consists of the amino acid sequence of any one of SEQ ID NOs: 1-48 and 98-150 or a mature polypeptide thereof.

[1247] In some embodiments, the cell comprises a polynucleotide that comprises, consists essentially of or consists of a nucleic acid sequence encoding a polypeptide having about/at least 60, 61, 62, 63, 64, 65, 66, 67, 68, 69, 70, 71, 72, 73, 74, 75, 76, 77, 78, 79, 80, 81, 82, 83, 84, 85, 86, 87, 88, 89, 90, 91, 92, 93, 94, 95, 96, 97, 98, 99 or 100% sequence identity to any one or more of SEQ ID NOs: 1-48 and 98-150.

[1248] In some embodiments, the cell comprises a polynucleotide that comprises, consists essentially of or consists of a nucleic acid sequence encoding a polypeptide having about/at least 60, 61, 62, 63, 64, 65, 66, 67, 68, 69, 70, 71, 72, 73, 74, 75, 76, 77, 78, 79, 80, 81, 82, 83, 84, 85, 86, 87, 88, 89, 90, 91, 92, 93, 94, 95, 96, 97, 98, 99 or 100% sequence identity to a mature polypeptide of any one or more of SEQ ID NOs: 1-48 and 98-150.

[1249] In preferred embodiments, the cell comprises a polynucleotide that comprises, consists essentially of or consists of the nucleic acid sequence of any one of SEQ ID NOs: 49-97 and 151-203 or a cDNA sequence thereof.

[1250] In some embodiments, the cell comprises a polynucleotide that encodes a polypeptide that comprises, consists essentially of or consists of a fragment of one of SEQ ID NOs: 1-48 and 98-150 or a mature peptide thereof. For example, the microorganism comprises a polynucleotide that encodes a fragment of any one of SEQ ID NOs: 1-48 and 98-150 or a mature peptide thereof, said fragment comprising at least 85, 86, 87, 88, 89, 90, 91, 92, 93, 94, 95, 96, 97, 98 or 99% of the amino acids found in the original protein.

[1251] In some embodiments, the cell comprises a polynucleotide that encodes a polypeptide that comprises, consists essentially of or consists of any one of SEQ ID NOs: 1-48 and 98-150 or a mature polypeptide thereof with an N-terminal extension of one or more amino acids (e.g., 1, 2, 3, 4, 5, 6, 7, 8, 9, 10, 11, 12, 13, 14, 15, 16, 17, 18, 19, 20 or more amino acids), a C-terminal extension of one or more amino acids (e.g., 1, 2, 3, 4, 5, 6, 7, 8, 9, 10, 11, 12, 13, 14, 15, 16, 17, 18, 19, 20 or more amino acids), one or more substitutions (e.g., 1, 2, 3, 4, 5, 6, 7, 8, 9, 10, 11, 12, 13, 14, 15, 16, 17, 18, 19, 20 or more substitutions), one or more insertions (e.g., 1, 2, 3, 4, 5, 6, 7, 8, 9, 10, 11, 12, 13, 14, 15, 16, 17, 18, 19, 20 or more insertions), and/or one or more deletions (e.g., 1, 2, 3, 4, 5, 6, 7, 8, 9, 10, 11, 12, 13, 14, 15, 16, 17, 18, 19, 20 or more deletions). The amino acid changes may be of a minor nature, that is conservative amino acid substitutions or insertions that do not significantly affect the folding and/or activity of the protein; small deletions, typically of 1-30 amino acids; small amino- or carboxyl-terminal extensions, such as an amino-terminal methionine residue; a small linker peptide of up to 20-25 residues; or a small extension that facilitates purification by changing net charge or another function, such as a poly-histidine tract, an antigenic epitope or a binding module.

[1252] The present disclosure thus extends to recombinant host cells, comprising a polynucleotide of the present disclosure operably linked to one or more control sequences that direct the production of a protein of the present disclosure.

[1253] A construct or vector comprising a polynucleotide is introduced into a host cell so that the construct or vector is maintained as a chromosomal integrant or as a self-replicating extra-chromosomal vector as described earlier. The choice of a host cell will to a large extent depend upon the gene encoding the protein and its source. The protein can be native or heterologous to the recombinant host cell. Also, at least one of the one or more control sequences can be heterologous to the polynucleotide encoding the protein. The recombinant host cell may comprise a single copy, or at least two copies, e.g., three, four, five, or more copies of the polynucleotide of the present disclosure.

[1254] The host cell may be any microbial cell useful in the recombinant production of a protein of the present disclosure, e.g., a prokaryotic cell or a fungal cell.

[1255] The prokaryotic host cell may be any Gram-positive or Gram-negative bacterium. Gram-positive bacteria include, but are not limited to, Bacillus, Clostridium, Enterococcus, Geobacillus, Lactobacillus, Lactococcus, Oceanobacillus, Staphylococcus, Streptococcus, and Streptomyces. Gram-negative bacteria include, but are not limited to, Campylobacter, E. coli, Flavobacterium, Fusobacterium, Helicobacter, Ilyobacter, Neisseria, Pseudomonas, Salmonella, and Ureaplasma.

[1256] The bacterial host cell may be any Bacillus cell including, but not limited to, Bacillus alkalophilus, Bacillus amyloliquefaciens, Bacillus brevis, Bacillus circulans, Bacillus clausii, Bacillus coagulans, Bacillus firmus, Bacillus lautus, Bacillus lentus, Bacillus lichenformis, Bacillus megaterium, Bacillus pumilus, Bacillus stearothermophilus, Bacillus subtilis, and Bacillus thuringiensis cells. In an embodiment, the Bacillus cell is a Bacillus amyloliquefaciens, Bacillus licheniformis and Bacillus subtilis cell.

[1257] For purposes of this disclosure, Bacillus classes/genera/species shall be defined as described in Patel and Gupta, 2020, Int. J. Syst. Evol. Microbiol. 70: 406-438.

[1258] The bacterial host cell may also be any Streptococcus cell including, but not limited to, Streptococcus equisimilis, Streptococcus pyogenes, Streptococcus uberis, and Streptococcus equi subsp. Zooepidemicus cells.

[1259] The bacterial host cell may also be any Streptomyces cell including, but not limited to, Streptomyces achromogenes, Streptomyces avermitilis, Streptomyces coelicolor, Streptomyces griseus, and Streptomyces lividans cells.

[1260] Methods for introducing DNA into prokaryotic host cells are well-known in the art, and any suitable method can be used including but not limited to protoplast transformation, competent cell transformation, electroporation, conjugation, transduction, with DNA introduced as linearized or as circular polynucleotide. Persons skilled in the art will be readily able to identify a suitable method for introducing DNA into a given prokaryotic cell depending, e.g., on the genus. Methods for introducing DNA into prokaryotic host cells are for example described in Heinze et al., 2018, BMC Microbiology 18:56, Burke et al., 2001, Proc. Natl. Acad. Sci. USA 98: 6289-6294, Choi et al., 2006, J. Microbiol. Methods 64: 391-397, and Donald et al., 2013, J. Bacteriol. 195(11): 2612-2620.

[1261] The host cell may be a fungal cell. “Fungi” as used herein includes the phyla Ascomycota, Basidiomycota, Chytridiomycota, and Zygomycota as well as the Oomycota and all mitosporic fungi (as defined by Hawksworth et al., In, Ainsworth and Bisby's Dictionary of The Fungi, 8th edition, 1995, CAB International, University Press, Cambridge, UK).

[1262] Fungal cells may be transformed by a process involving protoplast-mediated transformation, Agrobacterium-mediated transformation, electroporation, biolistic method and shock-wave-mediated transformation as reviewed by Li et al., 2017, Microbial Cell Factories 16: 168 and procedures described in EP 238023, Yelton et al., 1984, Proc. Natl. Acad. Sci. USA 81: 1470-1474, Christensen et al., 1988, Bio/Technology 6: 1419-1422, and Lubertozzi and Keasling, 2009, Biotechn. Advances 27: 53-75. However, any method known in the art for introducing DNA into a fungal host cell can be used, and the DNA can be introduced as linearized or as circular polynucleotide.

[1263] The fungal host cell may be a yeast cell. “Yeast” as used herein includes ascosporogenous yeast (Endomycetales), basidiosporogenous yeast, and yeast belonging to the Fungi Imperfecti (Blastomycetes). For purposes of this disclosure, yeast shall be defined as described in Biology and Activities of Yeast (Skinner, Passmore, and Davenport, editors, Soc. App. Bacteriol. Symposium Series No. 9, 1980).

[1264] The yeast host cell may be a Candida, Hansenula, Kluyveromyces, Pichia, Saccharomyces, Schizosaccharomyces, or Yarrowia cell, such as a Kluyveromyces lactis, Saccharomyces carlsbergensis, Saccharomyces cerevisiae, Saccharomyces diastaticus, Saccharomyces douglasii, Saccharomyces kluyveri, Saccharomyces norbensis, Saccharomyces oviformis, or Yarrowia lipolytica cell. In a preferred embodiment, the yeast host cell is a Pichia or Komagataella cell, e.g., a Pichia pastoris cell (Komagataella phaffii).

[1265] The fungal host cell may be a filamentous fungal cell. “Filamentous fungi” include all filamentous forms of the subdivision Eumycota and Oomycota (as defined by Hawksworth et al., 1995, supra). The filamentous fungi are generally characterized by a mycelial wall composed of chitin, cellulose, glucan, chitosan, mannan, and other complex polysaccharides. Vegetative growth is by hyphal elongation and carbon catabolism is obligately aerobic. In contrast, vegetative growth by yeasts such as Saccharomyces cerevisiae is by budding of a unicellular thallus and carbon catabolism may be fermentative.

[1266] The filamentous fungal host cell may be an Acremonium, Aspergillus, Aureobasidium, Bjerkandera, Ceriporiopsis, Chrysosporium, Coprinus, Coriolus, Cryptococcus, Filibasidium, Fusarium, Humicola, Magnaporthe, Mucor, Myceliophthora, Neocallimastix, Neurospora, Paecilomyces, Penicillium, Phanerochaete, Phlebia, Piromyces, Pleurotus, Schizophyllum, Talaromyces, Thermoascus, Thielavia, Tolypocladium, Trametes, or Trichoderma cell. In a preferred embodiment, the filamentous fungal host cell is an Aspergillus, Trichoderma or Fusarium cell. In a further preferred embodiment, the filamentous fungal host cell is an Aspergillus niger, Aspergillus oryzae, Trichoderma reesei, or Fusarium venenatum cell.

[1267] For example, the filamentous fungal host cell may be an Aspergillus awamori, Aspergillus foetidus, Aspergillus fumigatus, Aspergillus japonicus, Aspergillus nidulans, Aspergillus niger, Aspergillus oryzae, Bjerkandera adusta, Ceriporiopsis aneirina, Ceriporiopsis caregiea, Ceriporiopsis gilvescens, Ceriporiopsis pannocinta, Ceriporiopsis rivulosa, Ceriporiopsis subrufa, Ceriporiopsis subvermispora, Chrysosporium inops, Chrysosporium keratinophilum, Chrysosporium lucknowense, Chrysosporium merdarium, Chrysosporium pannicola, Chrysosporium queenslandicum, Chrysosporium tropicum, Chrysosporium zonatum, Coprinus cinereus, Coriolus hirsutus, Fusarium bactridioides, Fusarium cerealis, Fusarium crookwellense, Fusarium culmorum, Fusarium graminearum, Fusarium graminum, Fusarium heterosporum, Fusarium negundi, Fusarium oxysporum, Fusarium reticulatum, Fusarium roseum, Fusarium sambucinum, Fusarium sarcochroum, Fusarium sporotrichioides, Fusarium sulphureum, Fusarium torulosum, Fusarium trichothecioides, Fusarium venenatum, Humicola insolens, Humicola lanuginosa, Mucor miehei, Myceliophthora thermophila, Neurospora crassa, Penicillium purpurogenum, Phanerochaete chrysosporium, Phlebia radiata, Pleurotus eryngii, Talaromyces emersonii, Thielavia terrestris, Trametes villosa, Trametes versicolor, Trichoderma harzianum, Trichoderma koningii, Trichoderma longibrachiatum, Trichoderma reesei, or Trichoderma viride cell.

[1268] In an aspect, the host cell is isolated.

[1269] In another aspect, the host cell is purified.

[1270] The present disclosure also provides plants and plant parts expressing one or more proteins of the present disclosure, including plants that naturally express one or more enzymes of the present disclosure and plants that have been engineered to express one or more enzymes of the present disclosure.

[1271] In some embodiments, the plant or plant part expresses:
[1272] a) a polypeptide having about/at least 60, 61, 62, 63, 64, 65, 66, 67, 68, 69, 70, 71, 72, 73, 74, 75, 76, 77, 78, 79, 80, 81, 82, 83, 84, 85, 86, 87, 88, 89, 90, 91, 92, 93, 94, 95, 96, 97, 98, 99 or 100% sequence identity to any one or more of SEQ ID NOs: 1-48 and 98-150;
[1273] b) a polypeptide having about/at least 60, 61, 62, 63, 64, 65, 66, 67, 68, 69, 70, 71, 72, 73, 74, 75, 76, 77, 78, 79, 80, 81, 82, 83, 84, 85, 86, 87, 88, 89, 90, 91, 92, 93, 94, 95, 96, 97, 98, 99 or 100% sequence identity to a mature polypeptide of any one or more of SEQ ID NOs: 1-48 and 98-150;
[1274] c) a polypeptide encoded by a polynucleotide having about/at least 60, 61, 62, 63, 64, 65, 66, 67, 68, 69, 70, 71, 72, 73, 74, 75, 76, 77, 78, 79, 80, 81, 82, 83, 84, 85, 86, 87, 88, 89, 90, 91, 92, 93, 94, 95, 96, 97, 98, 99 or 100% sequence identity to any one or more of SEQ ID NOs: 49-97 and 151-203 or the cDNA sequence thereof;
[1275] d) a polypeptide derived from any one of SEQ ID NOs: 1-48 and 98-150 by substitution, deletion or insertion of one or more amino acids;
[1276] e) a polypeptide derived from a mature polypeptide any one of SEQ ID NOs: 1-48 and 98-150 by substitution, deletion or insertion of one or more amino acids;
[1277] f) a polypeptide derived from the polypeptide of any one of a) through e) wherein the N- and/or C-terminal end has been extended by the addition of one or more amino acids; and/or
[1278] g) a fragment of the polypeptide of any one of a) through f).

[1279] In preferred embodiments, the plant or plant part expresses a polypeptide that comprises, consists essentially of or consists of the amino acid sequence of any one of SEQ ID NOs: 1-48 and 98-150 or a mature polypeptide thereof.

[1280] In some embodiments, the plant or plant part expresses a polypeptide that comprises, consists essentially of or consists of a fragment of one of SEQ ID NOs: 1-48 and 98-150 or a mature peptide thereof. For example, the microorganism may express a fragment of any one of SEQ ID NOs: 1-48 and 98-150 or a mature peptide thereof, said fragment comprising at least 85, 86, 87, 88, 89, 90, 91, 92, 93, 94, 95, 96, 97, 98 or 99% of the amino acids found in the original protein.

[1281] In some embodiments, the plant or plant part expresses a polypeptide that comprises, consists essentially of or consists of any one of SEQ ID NOs: 1-48 and 98-150 or a mature polypeptide thereof with an N-terminal extension of one or more amino acids (e.g., 1, 2, 3, 4, 5, 6, 7, 8, 9, 10, 11, 12, 13, 14, 15, 16, 17, 18, 19, 20 or more amino acids), a C-terminal extension of one or more amino acids (e.g., 1, 2, 3, 4, 5, 6, 7, 8, 9, 10, 11, 12, 13, 14, 15, 16, 17, 18, 19, 20 or more amino acids), one or more substitutions (e.g., 1, 2, 3, 4, 5, 6, 7, 8, 9, 10, 11, 12, 13, 14, 15, 16, 17, 18, 19, 20 or more substitutions), one or more insertions (e.g., 1, 2, 3, 4, 5, 6, 7, 8, 9, 10, 11, 12, 13, 14, 15, 16, 17, 18, 19, 20 or more insertions), and/or one or more deletions (e.g., 1, 2, 3, 4, 5, 6, 7, 8, 9, 10, 11, 12, 13, 14, 15, 16, 17, 18, 19, 20 or more deletions). The amino acid changes may be of a minor nature, that is conservative amino acid substitutions or insertions that do not significantly affect the folding and/or activity of the protein; small deletions, typically of 1-30 amino acids; small amino- or carboxyl-terminal extensions, such as an amino-terminal methionine residue; a small linker peptide of up to 20-25 residues; or a small extension that facilitates purification by changing net charge or another function, such as a poly-histidine tract, an antigenic epitope or a binding module.

[1282] In some embodiments, the plant or plant part comprises a homologous or heterologous nucleic acid sequence that is at least 60, 61, 62, 63, 64, 65, 66, 67, 68, 69, 70, 71, 72, 73, 74, 75, 76, 77, 78, 79, 80, 81, 82, 83, 84, 85, 86, 87, 88, 89, 90, 91, 92, 93, 94, 95, 96, 97, 98, 99 or 100% identical to one or more of the nucleic acid sequences set forth herein as SEQ ID Nos: 49-97 and 151-203 or the cDNA sequence thereof.

[1283] In preferred embodiments, the plant or plant part comprises a polynucleotide encodes a polypeptide that comprises, consists essentially of or consists of the amino acid sequence of any one of SEQ ID NOs: 1-48 and 98-150 or a mature polypeptide thereof.

[1284] In some embodiments, the plant or plant part comprises a polynucleotide that comprises, consists essentially of or consists of a nucleic acid sequence encoding a polypeptide having about/at least 60, 61, 62, 63, 64, 65, 66, 67, 68, 69, 70, 71, 72, 73, 74, 75, 76, 77, 78, 79, 80, 81, 82, 83, 84, 85, 86, 87, 88, 89, 90, 91, 92, 93, 94, 95, 96, 97, 98, 99 or 100% sequence identity to any one or more of SEQ ID NOs: 1-48 and 98-150.

[1285] In some embodiments, the plant or plant part comprises a polynucleotide that comprises, consists essentially of or consists of a nucleic acid sequence encoding a polypeptide having about/at least 60, 61, 62, 63, 64, 65, 66, 67, 68, 69, 70, 71, 72, 73, 74, 75, 76, 77, 78, 79, 80, 81, 82, 83, 84, 85, 86, 87, 88, 89, 90, 91, 92, 93, 94, 95, 96, 97, 98, 99 or 100% sequence identity to a mature polypeptide of any one or more of SEQ ID NOs: 1-48 and 98-150.

[1286] In preferred embodiments, the plant or plant part comprises a polynucleotide that comprises, consists essentially of or consists of the nucleic acid sequence of any one of SEQ ID NOs: 49-97 and 151-203 or a cDNA sequence thereof.

[1287] In some embodiments, the plant or plant part comprises a polynucleotide that encodes a polypeptide that comprises, consists essentially of or consists of a fragment of one of SEQ ID NOs: 1-48 and 98-150 or a mature peptide thereof. For example, the microorganism comprises a polynucleotide that encodes a fragment of any one of SEQ ID NOs: 1-48 and 98-150 or a mature peptide thereof, said fragment comprising at least 85, 86, 87, 88, 89, 90, 91, 92, 93, 94, 95, 96, 97, 98 or 99% of the amino acids found in the original protein.

[1288] In some embodiments, the plant or plant part comprises a polynucleotide that encodes a polypeptide that comprises, consists essentially of or consists of any one of SEQ ID NOs: 1-48 and 98-150 or a mature polypeptide thereof with an N-terminal extension of one or more amino acids (e.g., 1, 2, 3, 4, 5, 6, 7, 8, 9, 10, 11, 12, 13, 14, 15, 16, 17, 18, 19, 20 or more amino acids), a C-terminal extension of one or more amino acids (e.g., 1, 2, 3, 4, 5, 6, 7, 8, 9, 10, 11, 12, 13, 14, 15, 16, 17, 18, 19, 20 or more amino acids), one or more substitutions (e.g., 1, 2, 3, 4, 5, 6, 7, 8, 9, 10, 11, 12, 13, 14, 15, 16, 17, 18, 19, 20 or more substitutions), one or more insertions (e.g., 1, 2, 3, 4, 5, 6, 7, 8, 9, 10, 11, 12, 13, 14, 15, 16, 17, 18, 19, 20 or more insertions), and/or one or more deletions (e.g., 1, 2, 3, 4, 5, 6, 7, 8, 9, 10, 11, 12, 13, 14, 15, 16, 17, 18, 19, 20 or more deletions). The amino acid changes may be of a minor nature, that is conservative amino acid substitutions or insertions that do not significantly affect the folding and/or activity of the protein; small deletions, typically of 1-30 amino acids; small amino- or carboxyl-terminal extensions, such as an amino-terminal methionine residue; a small linker peptide of up to 20-25 residues; or a small extension that facilitates purification by changing net charge or another function, such as a poly-histidine tract, an antigenic epitope or a binding module.

[1289] The present disclosure also extends to plants, e.g., a transgenic plant, plant part, or plant cell, comprising a polynucleotide of the present disclosure so as to express and produce a protein of the present disclosure in recoverable quantities. The protein may be recovered from the plant or plant part. Alternatively, the plant or plant part containing the protein may be used as such for improving the quality of a food or feed, e.g., improving nutritional value, palatability, and rheological properties, or to destroy an antinutritive factor.

[1290] The transgenic plant can be dicotyledonous (a dicot) or monocotyledonous (a monocot). Examples of monocot plants are grasses, such as meadow grass (blue grass, Poa), forage grass such as Festuca, Lolium, temperate grass, such as Agrostis, and cereals, e.g., wheat, oats, rye, barley, rice, sorghum, and maize (corn).

[1291] Examples of dicot plants are tobacco, legumes, such as lupins, potato, sugar beet, pea, bean and soybean, and cruciferous plants (family Brassicaceae), such as cauliflower, rape seed, and the closely related model organism Arabidopsis thaliana.

[1292] Examples of plant parts are stem, callus, leaves, root, fruits, seeds, and tubers as well as the individual tissues comprising these parts, e.g., epidermis, mesophyll, parenchyme, vascular tissues, meristems. Specific plant cell compartments, such as chloroplasts, apoplasts, mitochondria, vacuoles, peroxisomes and cytoplasm are also considered to be a plant part. Furthermore, any plant cell, whatever the tissue origin, is considered to be a plant part. Likewise, plant parts such as specific tissues and cells isolated to facilitate the utilization of the invention are also considered plant parts, e.g., embryos, endosperms, aleurone and seed coats.

[1293] Also included within the scope of the present disclosure are the progeny of such plants, plant parts, and plant cells.

[1294] The transgenic plant or plant cell expressing the protein may be constructed in accordance with methods known in the art. In short, the plant or plant cell is constructed by incorporating one or more expression constructs encoding the protein into the plant host genome or chloroplast genome and propagating the resulting modified plant or plant cell into a transgenic plant or plant cell. In an embodiment, a plant cell does not belong to plant varieties.

[1295] The expression construct is conveniently a nucleic acid construct that comprises a polynucleotide encoding a protein, wherein the polynucleotide is operably linked with appropriate regulatory sequences required for expression of the polynucleotide in the plant or plant part of choice. Furthermore, the expression construct may comprise a selectable marker useful for identifying plant cells into which the expression construct has been integrated and DNA sequences necessary for introduction of the construct into the plant in question (the latter depends on the DNA introduction method to be used).

[1296] The choice of regulatory sequences, such as promoter and terminator sequences and optionally signal or transit sequences, is determined, for example, on the basis of when, where, and how the protein is desired to be expressed (Sticklen, 2008, Nature Reviews 9: 433-443). For instance, the expression of the gene encoding a protein may be constitutive or inducible, or may be developmental, stage or tissue specific, and the gene product may be targeted to a specific tissue or plant part such as seeds or leaves. Regulatory sequences are, for example, described by Tague et al., 1988, Plant Physiology 86: 506.

[1297] For constitutive expression, the 35S-CaMV, the maize ubiquitin 1, or the rice actin 1 promoter may be used (Franck et al., 1980, Cell 21: 285-294; Christensen et al., 1992, Plant Mol. Biol. 18: 675-689; Zhang et al., 1991, Plant Cell 3: 1155-1165). Organ-specific promoters may be, for example, a promoter from storage sink tissues such as seeds, potato tubers, and fruits (Edwards and Coruzzi, 1990, Ann. Rev. Genet. 24: 275-303), or from metabolic sink tissues such as meristems (Ito et al., 1994, Plant Mol. Biol. 24: 863-878), a seed specific promoter such as the glutelin, prolamin, globulin, or albumin promoter from rice (Wu et al., 1998, Plant Cell Physiol. 39: 885-889), a Vicia faba promoter from the legumin B4 and the unknown seed protein gene from Vicia faba (Conrad et al., 1998, J. Plant Physiol. 152: 708-711), a promoter from a seed oil body protein (Chen et al., 1998, Plant Cell Physiol. 39: 935-941), the storage protein napA promoter from Brassica napus, or any other seed specific promoter known in the art, e.g., as described in WO 91/14772. Furthermore, the promoter may be a leaf specific promoter such as the rbcs promoter from rice or tomato (Kyozuka et al., 1993, Plant Physiol. 102: 991-1000), the chlorella virus adenine methyltransferase gene promoter (Mitra and Higgins, 1994, Plant Mol. Biol. 26: 85-93), the aldP gene promoter from rice (Kagaya et al., 1995, Mol. Gen. Genet. 248: 668-674), or a wound inducible promoter such as the potato pin2 promoter (Xu et al., 1993, Plant Mol. Biol. 22: 573-588). Likewise, the promoter may be induced by abiotic treatments such as temperature, drought, or alterations in salinity or induced by exogenously applied substances that activate the promoter, e.g., ethanol, oestrogens, plant hormones such as ethylene, abscisic acid, and gibberellic acid, and heavy metals.

[1298] A promoter enhancer element may also be used to achieve higher expression of a protein in the plant. For instance, the promoter enhancer element may be an intron that is placed between the promoter and the polynucleotide encoding a protein. For instance, Xu et al., 1993, supra, disclose the use of the first intron of the rice actin 1 gene to enhance expression.

[1299] The selectable marker gene and any other parts of the expression construct may be chosen from those available in the art.

[1300] The nucleic acid construct is incorporated into the plant genome according to conventional techniques known in the art, including Agrobacterium-mediated transformation, virus-mediated transformation, microinjection, particle bombardment, biolistic transformation, and electroporation (Gasser et al., 1990, Science 244: 1293; Potrykus, 1990, Bio/Technology 8: 535; Shimamoto et al., 1989, Nature 338: 274).

[1301] Agrobacterium tumefaciens-mediated gene transfer is a method for generating transgenic dicots (for a review, see Hooykas and Schilperoort, 1992, Plant Mol. Biol. 19: 15-38) and for transforming monocots, although other transformation methods may be used for these plants. A method for generating transgenic monocots is particle bombardment (microscopic gold or tungsten particles coated with the transforming DNA) of embryonic calli or developing embryos (Christou, 1992, Plant J. 2: 275-281; Shimamoto, 1994, Curr. Opin. Biotechnol. 5: 158-162; Vasil et al., 1992, Bio/Technology 10: 667-674). An alternative method for transformation of monocots is based on protoplast transformation as described by Omirulleh et al., 1993, Plant Mol. Biol. 21: 415-428. Additional transformation methods include those described in U.S. Pat. Nos. 6,395,966 and 7,151,204 (both of which are herein incorporated by reference in their entirety).

[1302] Following transformation, the transformants having incorporated the expression construct are selected and regenerated into whole plants according to methods well known in the art. Often the transformation procedure is designed for the selective elimination of selection genes either during regeneration or in the following generations by using, for example, co-transformation with two separate T-DNA constructs or site-specific excision of the selection gene by a specific recombinase.

[1303] In addition to direct transformation of a particular plant genotype with a construct of the present disclosure, transgenic plants may be made by crossing a plant having the construct to a second plant lacking the construct. For example, a construct encoding a protein can be introduced into a particular plant variety by crossing, without the need for ever directly transforming a plant of that given variety. Therefore, the present disclosure encompasses not only a plant directly regenerated from cells which have been transformed in accordance with the present disclosure, but also the progeny of such plants. As used herein, progeny may refer to the offspring of any generation of a parent plant prepared in accordance with the present disclosure. Such progeny may include a DNA construct prepared in accordance with the present disclosure. Crossing results in the introduction of a transgene into a plant line by cross pollinating a starting line with a donor plant line. Non-limiting examples of such steps are described in U.S. Pat. No. 7,151,204.

[1304] Plants may be generated through a process of backcross conversion. For example, plants include plants referred to as a backcross converted genotype, line, inbred, or hybrid.

[1305] Genetic markers may be used to assist in the introgression of one or more transgenes of the disclosure from one genetic background into another. Marker assisted selection offers advantages relative to conventional breeding in that it can be used to avoid errors caused by phenotypic variations. Further, genetic markers may provide data regarding the relative degree of elite germplasm in the individual progeny of a particular cross. For example, when a plant with a desired trait which otherwise has a non-agronomically desirable genetic background is crossed to an elite parent, genetic markers may be used to select progeny which not only possess the trait of interest, but also have a relatively large proportion of the desired germplasm. In this way, the number of generations required to introgress one or more traits into a particular genetic background is minimized.

[1306] The present disclosure also relates to methods of producing a protein of the present disclosure comprising (a) cultivating a transgenic plant or a plant cell comprising a polynucleotide encoding the protein under conditions conducive for production of the protein; and (b) recovering the protein.

[1307] The present disclosure also extends to methods of producing a mutant of a parent cell, which comprises disrupting or deleting a polynucleotide, or a portion thereof, encoding a protein of the present disclosure, which results in the mutant cell producing less of the protein than the parent cell when cultivated under the same conditions.

[1308] The mutant cell may be constructed by reducing or eliminating expression of the polynucleotide using methods well known in the art, for example, one or more nucleotide insertions, one or more gene disruptions, one or more nucleotide replacements, or one or more nucleotide deletions.

[1309] The polynucleotide to be modified or inactivated may be, for example, the coding region or a part thereof essential for activity, or a regulatory or control element required for expression of the coding region, e.g., a functional part of a promoter sequence, and/or a regulatory or control element required for the transcription or translation of the polynucleotide. Other control sequences for possible modification include, but are not limited to, a leader, polyadenylation sequence, propeptide sequence, signal peptide sequence, transcription terminator, and transcriptional activator.

[1310] Modification or inactivation of the polynucleotide may be performed by subjecting the parent cell to mutagenesis and selecting for mutant cells in which expression of the polynucleotide has been reduced or eliminated. The mutagenesis, which may be specific or random, may be performed, for example, by use of a suitable physical or chemical mutagenizing agent, by use of a suitable oligonucleotide, or by subjecting the DNA sequence to PCR generated mutagenesis. Furthermore, the mutagenesis may be performed by use of any combination of these mutagenizing agents.

[1311] Examples of a physical or chemical mutagenizing agent include ultraviolet (UV) irradiation, hydroxylamine, N-methyl-N′-nitro-N-nitrosoguanidine (MNNG), O-methyl hydroxylamine, nitrous acid, ethyl methane sulphonate (EMS), sodium bisulphite, formic acid, and nucleotide analogues (see J. L. Bose, Springer Protocols 2016, Methods in Molecular Biology, The Genetic Manipulation of Staphylococci).

[1312] Additionally or alternatively, nucleotides may be inserted or removed so as to result in the introduction of a stop codon, the removal of the start codon, or a change in the open reading frame. Such modification or inactivation may be accomplished by site-directed mutagenesis or PCR generated mutagenesis in accordance with methods known in the art, or by targeted gene editing using one or more nucleases, e.g., zinc-finger nucleases or CRISPR-associated nucleases. Additionally or alternatively, the modification or inactivation may be achieved by gene silencing, genetic repression, genetic activation, and/or post-translational mutagenesis, e.g., by methods employing non-coding RNA, RNAi, siRNA, miRNA, ribozymes, catalytically inactive nucleases, CRISPRi, nucleotide methylation, and/or histone acetylation. The modification may be transient and/or reversible, irreversible and/or stable, or the modification may be dependent on chemical inducers or dependent on cultivation conditions, such as the cultivation temperature.

[1313] The modification may be performed in vivo, i.e., directly on the cell expressing the polynucleotide to be modified, or the modification be performed in vitro.

[1314] An example of a convenient way to eliminate or reduce expression of a polynucleotide is based on techniques of gene replacement, gene deletion, or gene disruption. For example, in the gene disruption method, a nucleic acid sequence corresponding to the endogenous polynucleotide is mutagenized in vitro to produce a defective nucleic acid sequence that is then transformed into the parent cell to produce a defective gene. By homologous recombination, the defective nucleic acid sequence replaces the endogenous polynucleotide. It may be desirable that the defective polynucleotide also encodes a marker that may be used for selection of transformants in which the polynucleotide has been modified or destroyed. In an aspect, the polynucleotide is disrupted with a selectable marker such as those described herein.

[1315] The present disclosure further relates to a mutant cell of a parent cell that comprises a disruption or deletion of a polynucleotide encoding the protein or a control sequence thereof or a silenced gene encoding the protein, which results in the mutant cell producing less of the protein or no protein compared to the parent cell.

[1316] The protein-deficient mutant cells are useful as host cells for expression of native and heterologous proteins. Therefore, the present disclosure further relates to methods of producing a native or heterologous protein, comprising (a) cultivating the mutant cell under conditions conducive for production of the protein; and (b) recovering the protein. The term “heterologous proteins” means proteins that are not native to the host cell, e.g., a variant of a native protein. The host cell may comprise more than one copy of a polynucleotide encoding the native or heterologous protein.

[1317] The methods of the present disclosure for producing an essentially [enzyme]-free product are of interest in the production of proteins, e.g., proteins such as enzymes. The [enzyme]-deficient cells may also be used to express heterologous proteins of pharmaceutical interest such as hormones, growth factors, receptors, and the like.

[1318] In some embodiments, the present disclosure relates to a protein product essentially free from [enzyme] activity that is produced by a method of the present disclosure.

[1319] Compositions of the present disclosure are useful for preventing, treating, suppressing, eliminating and/or reducing the severity of infestations/infections of/by myriad pests, including, but not limited to, horticultural pests, such as acarids, bacteria, fungi, gastropods, insects, nematodes, oomycetes, protozoa and weeds.

[1320] Compositions of the present disclosure (i.e., proteins, formulations, polynucleotides and organisms of the present disclosure) may be used to prevent, treat, suppress, eliminate and/or reduce the severity of acarid infestations by, for example, reducing attraction of an acarid to a surface, inhibiting entry of an acarid into a material, inhibiting inhabitation by an acarid, inhibiting feeding of an acarid, inhibiting the growth of an acarid, inhibiting the reproduction and/or proliferation of an acarid, degrading on one or more structural components of an acarid (e.g. procuticle components, such as chitin, and epicuticle components, such as lipoproteins, hydrocarbons, polyphenols and esters of fatty acids and alcohols), killing an acarid, and/or reducing one or more symptoms of an acarid infestation. In some embodiments, such inhibition is complete or substantially complete, such that the acarid fails to inhabit/feed/grow/reproduce/proliferate at a rate effective to initiate and/or sustain an appreciable infestation. For example, spraying a plant with an enzyme of the present disclosure may reduce the attractiveness of the plant to an acarid, reduce an acarid's desire/ability to inhabit the plant, inhibit an acarid's desire/ability to feed on the plant, inhibiting the growth of an acarid after it inhabits/feeds on the plant, inhibit the reproduction and/or proliferation of an acarid on/in the plant, degrade one or more structural components of an acarid (e.g. one or more chitins, one or more lipoproteins and/or one or more long chain hydrocarbons) on/in the plant, and/or kill an acarid on/in the plant, thereby reducing one or more symptoms of infestation and/or enhancing one or more characteristics of growth and/or yield in the plant, as compared to an untreated control plant.

[1321] Compositions of the present disclosure may be used to prevent, treat, suppress, eliminate and/or reduce the severity of infestations of/by myriad acarids, including, but not limited to, herbivorous acarids, such as broad mites, bulb mites, cyclamen mites, earth mites, eriophyid mites, Lewis mites, russet mites, rust mites, and spider mites. In some embodiments, enzymes of the present disclosure are used to prevent and/or treat an infestation of a plant or plant part by one or more Auculops, (e.g., A. lycopersici), Calacarus (e.g., C. flagelliseta), Eutetranychus (e.g., E. lewesi), Halotydeus (e.g., H. destructor), Polyphagotarsonemus (e.g., P. latus), Rhizoglyphus, Tarsonemus (e.g., T. pallidus), and/or Tetranychus (e.g., T. cinnabarinus, T. evansi, T. ludeni, T. urticae).

[1322] Compositions of the present disclosure may be used to prevent, treat, suppress, eliminate and/or reduce the severity of bacterial infestations/infections by, for example, inhibiting adhesion of a bacterium to a surface, inhibiting entry of a bacterium into a material, inhibiting habitation by a bacterium, inhibiting the growth of a bacterium, inhibiting the reproduction and/or proliferation of a bacterium, degrading on one or more structural components of a bacterium (e.g. cell wall components, such as peptidoglycans and lipopolysaccharides), killing a bacterium, and/or reducing one or more symptoms of a bacterial infestation/infection. In some embodiments, such inhibition is complete or substantially complete, such that the bacterium fails to inhabit/feed/grow/reproduce/proliferate at a rate effective to initiate and/or sustain an appreciable infestation/infection. For example, spraying a plant with an enzyme of the present disclosure may inhibit a bacterium's ability to adhere to the surface of a plant, inhibit a bacterium's ability to enter into the plant, inhibit a bacterium's ability to inhabit the plant, inhibit growth of a bacterium on/in the plant, inhibit the reproduction and/or proliferation of a bacterium on/in the plant, degrade one or more structural components of a bacterium (e.g. one or more peptidoglycans and/or one or more lipopolysaccharides) on/in the plant, and/or kill a bacterium, thereby reducing one or more symptoms of infestation and/or enhancing one or more characteristics of growth and/or yield in the plant, as compared to an untreated control plant.

[1323] Compositions of the present disclosure may be used to prevent, treat, suppress, eliminate and/or reduce the severity of infestations/infections of/by myriad phytopathogenic bacteria, including, but not limited to, phytopathogenic Erwiniaceae and Xanthomonadales. In some embodiments, enzymes of the present disclosure are used to prevent, treat, suppress, eliminate and/or reduce the severity of an infestation/infection of a plant or plant part by one or more Agrobacterium (e.g., A. rhizogenes, A. tumefaciens, A. vitis), Burkholderia (e.g., B. gladioli), Clostridium, Dickeya (e.g., D. dadantii, D. solani), Erwinia (e.g., E. amylovora, E. aphidicola, E. carotovora, E. chrysanthemi, E. papayae, E. persicina, E. psidii, E. pyrifoliae, E. rhapontici, E. tracheiphila), Pectobacterium (e.g., P. atrosepticum, P. carotovorum), Pseudomonas (e.g., P. agarici, P. amygdali, P. avellanae,P. cannabina, P. caricapapayae, P. cichorii, P. coronafaciens, P. costantinii, P. ficuserectae, P. fuscovaginae, P. helianthin, P. meliae, P. savastanoi, P. syringae, P. tolaasii, P. tomato, P. turbinellae, P. viridiflava), Ralstonia (e.g., R. solanacearum), Xanthomonas (e.g., X. alfalfae, X. ampelina, X. arboricola, X. axonopodia, X. boreopolis, X. badrii, X. bromi, X. campestris, X. cassavae, X. citri, X. cucrurbitae, X. cyanopsidis, X. cynarae, X. euvesicatoria, X. frageriae, X. gardneri, X. holcicola, X. hortorum, X. hyacinthi, X. maliensis, X. malvacearum, X. manihotis, X. melonis, X. oryzae, X. papavericola, X. perforans, X. phaseoli, X. pisi, X. populi, X. sacchari, X. theicola, X. translucens, X. vasicola, X. vesicatoria), and/or Xylella (e.g., X. fastidiosa).

[1324] Compositions of the present disclosure may be used to prevent, treat, suppress, eliminate and/or reduce the severity of fungal infestations/infections by, for example, inhibiting adhesion of a fungus to a surface, inhibiting entry of a fungus into a material, inhibiting habitation by a fungus, inhibiting the growth of a fungus, inhibiting the reproduction and/or proliferation of a fungus, degrading on one or more structural components of a fungus (e.g. cell wall components, such as chitins, glucans and mannans, and cell membrane components, such as ergosterols), killing a fungus, and/or reducing one or more symptoms of a fungal infestation/infection. In some embodiments, such inhibition is complete or substantially complete, such that the fungus fails to inhabit/feed/grow/reproduce/proliferate at a rate effective to initiate and/or sustain an appreciable infestation/infection. For example, spraying a plant with an enzyme of the present disclosure may inhibit a fungus' ability to adhere to the surface of a plant, inhibit a fungus' ability to enter into the plant, inhibit a fungus' ability to inhabit the plant, inhibit growth of a fungus on/in the plant, inhibit the reproduction and/or proliferation of a fungus on/in the plant, degrade one or more structural components of a fungus (e.g. one or more chitins, one or more glucans and/or one or more mannans) on/in the plant, and/or kill a fungus, thereby reducing one or more symptoms of infestation and/or enhancing one or more characteristics of growth and/or yield in the plant, as compared to an untreated control plant.

[1325] Compositions of the present disclosure may be used to prevent, treat, suppress, eliminate and/or reduce the severity of infestations/infections of/by myriad phytopathogenic fungi, including, but not limited to, phytopathogenic Ascomycetes, Basidiomycetes, Chytridiomycota, Deueromycota, Peronosporomycota, Plasmodiophoromycota and Zygomycota, such as blasts, blights, bunts, galls, mildews, molds, rots, rusts, scabs, smuts and wilts. In some embodiments, enzymes of the present disclosure are used to prevent, treat, suppress, eliminate and/or reduce the severity of an infestation/infection of a plant or plant part by one or more Aecidium (e.g., A. aechmantherae, A. amaryllidis, A. breyniae, A. campanulastri, A. cannabis, A. cantensis, A. capsicum, A. foeniculi, A. narcissi), Alternaria (e.g., A. alternata, A. alternantherae, A. arachidis, A. arborescens, A. arbusti, A. blumeae, A. brassicae, A. brassicicola, A. burnsii. A. carotiincultae, A. carthami, A. celosiae, A. cinerariae, A. citri, A. conjuncta, A. cucumerina, A. dauci, A. dianthi, A. dianthicola, A. eichhorniae, A. euphorbiicola, A. gaisen, A. helianthi, A. helianthicola, A. hungarica, A. infectoria, A. japonica, A. leucanthemi, A. linicola, A. longipes, A. mali, A. molesta, A. padwickii, A. panax, A. perpunctulata, A. patroselini, A. porri, A. quericola, A. radicina, A. raphani, A. saponariae, A. selini, A. senecionis, A. smyrnii, A. solani, A. sonchi, A. tenuissima, A. triticina, A. ventricosa, A. zinniae), Ascochyta (e.g., A. asparagina, A. bohemica, A., caricae, A. doronici, A. fabae, A. gossypii, A. graminea, A. hordei, A. humuli, A. medicaginicola, A. pinodes, A. pisi, A. prasadii, A. rabiei, A. rhei, A. sorghi, A. sorghinia, A. spinaciae, A. tarda, A. tritici, A. viciae, A. vindobonensis), Ascospora (e.g., A. ruborum), Aspergillus (e.g., A. aculeatus, A. candidus, A. clavatus, A. fisherianus, A. flavus, A. fumigatus, A. niger, A. parasiticus, A. restrictus, A. sojae, A. solani), Asteroma (e.g., A. caryae), Austropuccinia (e.g., A. psidii), Bipolaris (e.g., B. cactivora, B. cookei, B. incurvata, B. sacchari, B. sorghicola, B. zeae), Blumeria (e.g., B. graminis), Boeremia (e.g., B. lycopersici), Botrytis (e.g., B. allii, B. anthophila, B. cinerea, B. citricola, B. citrina, B. elliptica, B. fabae, B. fabiopsis, B. galanthina, B. gladioli, B. gossypina, B. hormini, B. hyacinthi, B. isabellina, B. latebricola, B. liliorum, B. limacidae, B. luteobrunnea, B. lutescens, B. mali, B. monilioides, B. narcissicola, B. necans, B. paeoniae, B. peronosporoides, B. pistiae, B. platensis, B. pruinosa, B. pseudocinerea, B. pyramidalis, B. rivoltae, B. rosea, B. rubescens, B. rudiculoides, B. sekimotoi, B. septospora, B. setuligera, B. sinoallii, B. sonchina, B. splendida, B. squamosa, B. taxi, B. terrestris, B. tracheiphila, B. trifolii, B. tulipae, B. viciae-hirsutae, B. yuae), Calonectria (e.g., C. ilicicola, C. indusiate, C. kyotensis, C. pteridis, C. pyrochroa, C. quinqueseptata), Camarotella (e.g., C. acrocomiae, C. costaricensis), Candida (e.g., C. albicans), Capnodium (e.g., C. theae), Cephalosporium (e.g., C. gramineum), Ceratocystis (e.g., C. fimbriata), Ceratobasidium (e.g., C. cereale), Cercoseptoria (e.g., C. ocellata), Cercospora (e.g., C. angreci, C. apii, C. apiicola, C. arachidicola, C. asparagi, C. atrofiliformis, C. beticola, C. bolleana, C. brachypus, C. brassicola, C. brunkii, C. canescens, C. cannabis, C. cantuariensis, C. capsici, C. caribaea, C. carotae, C. circumscissa, C. citrulline, C. clemensiae, C. coffeicola, C. coryli, C. corylina, C. eleusine, C. fragariae, C. fuchsiae, C. fusca, C. fusimaculans, C. gerberae, C. halstedii, C. handelii, C. hayi, C. hydrangeae, C. kaki, C. kikuchii, C. lentis, C. liquidambraris, C. longipes, C. longissima, C. malloti, C. mamaonis, C. mangiferae, C. medicaginis, C. melongenae, C. minima, C. minuta, C. musae, C. nicotianae, C. odontoglossi, C. oryzae, C. papayae, C. penniseti, C. personata, C. piaropi, C. pisa-sativae, C. platanicola, C. puderii, C. pulcherrima, C. rhapidicola, C. rosicola, C. rubrotincta, C. sojina, C. solani, C. solani-tuberosi, C. sorghi, C. theae, C. tuberculans, C. vexans, C. vicosae, C. zeae-maydis, C. zebrina, C. zonata), Cercosporella (e.g., C. rubi), Choanephora (e.g., C. cucurbitarum), Cladosporium (e.g., C. arthropodii, C. brassicae, C. brassicola, C. chrysanthemi, C. citri, C. cladosporioides, C. cucumerinum, C. fulvum, C. gossypiicola, C. herbarum, C. hydrangeae, C. leguminicola, C. musae, C. oncobae, C. orchidis, C. pisi, C. rhododendri, C. salinae, C. spharospermum, C. sorghi, C. syringae, C. syringicola, C. yuccae, C. zeae), Claviceps (e.g., C. africana, C. fusiformis, C. paspali, C. purpurea, C. sorghi, C. zizaniae), Clitocybe (e.g., C. parasitica), Coccidioides (e.g., C. immitus), Cochliobolus (e.g., C. carbonum, C. cymbopogonis, C. hawaiiensis, C. heterostrophus, C. lunatus, C. miyabeanus, C. ravenelii, C. sativus, C. setariae, C. spicifer, C. stenospilus, C. tuberculatus, C. victoriae), Coleosporium (e.g., C. helianthi, C. ipomoeae, C. madiae, C. pacificum, C. tussilaginis), Colletotrichum (e.g., C. acutatum, C. agaves, C. arachidis, C. boninense, C. brasiliense, C. brassicola, C. brevisporum, C. cacao, C. capsici, C. caudatum, C. cereale, C. citri, C. citricola, C. coccodes, C. coffeanum, C. crassipes, C. curcumae, C. dematium, C. derridis, C. destructivum, C. fioriniae, C. fragariae, C. fructi, C. fruticola, C. fructivorum, C. gloeosporioides, C. glycines, C. graminicola, C. gossypii, C. hanaui, C. higginsianum, C. jacksonii, C. kahawae, C. lentis, C. limonicola, C. lindemuthianum, C. lini, C. lupini, C. mangenotii, C. melonis, C. miscanthi, C. musae, C. nicholsonii, C. nigrum, C. orbiculare, C. orchidis, C. paspali, C. pisi, C. pisicola, C. radicis, C. roseum, C. serranegrense, C. sojae, C. spinaceae, C. sublineolum, C. sublineola, C. tabacum, C. trichellum, C. trifolii, C. truncatum, C. zoysiae), Coniella, Coniothecium (e.g., C. chomatosporum), Coniothyrium (e.g., C. henriquesii, C. rosarum, C. wernsdorffiae), Coprinopsis (e.g., C. psychromorbida), Cordana (e.g., C. johnstonii, C. musae), Corticum (e.g., C. theae), Cryphonectria (e.g., C. parasitica), Cylindrocarpon (e.g., C. ianthothele, C. magnusianum, C. musae), Cylindrocladiella (e.g., C. camelliae, C. parva), Cylindrocladium (e.g., C. lanceolatum, C. peruvianum), Cylindrosporium (e.g., C. cannabinum, C. juglandis, C. rubi), Cymadothea (e.g., C. trifolii), Cytospora (e.g, C. palmarum, C. personata, C. sacchari, C. sacculus, C. terebinthi), Cytosporina (e.g., C. ludibunda), Diaporthe (e.g., D. arctii, D. asparagi, D. capsici, D. citri, D. coffeae, D. dulcamarae, D. eres, D. helianthi, D. lagunensis, D. lokoyae, D. melonis, D. musae, D. orthoceras, D. perniciosa, D. phaseolorum, D. rudis, D. tanakae, D. viticola), Diplodia (e.g., D. gossypina), Dreschlera (e.g., D. avenacea, D. campanulata, D. dematioidea, D. gigantea, D. glycines, D. graminea, D. hawaiiensis, D. musae, D. poae, D. teres, D. wirreganensis), Eremothcium (formerly Nematospora) (e.g., E. gossypii), Erysiphe (e.g., E. betae, E. cichoracearum, E. communis, E. cruciferarum, E. flexuosa, E. heraclei, E. necator, E. pisi, E. polygoni, E. robiniae, E. syringae), Exserohilum (e.g., E. oryzicola, E. oryzinum), Fusarium (e.g., F. affine, F. arthrosporioides, F. avenaceum, F. circinatum, F. crookwellense, F. culmorum, F. fujikuroi, F. graminearum, F. incarnatum, F. langsethiae, F. mangiferae, F. merismoides, F. moniliforme, F. oxysporum, F. pallidoroseum, F. poae, F. proliferatum, F. redolens, F. roseum, F. sacchari, F. solani, F. sporotrichioides, F. sterilihyphosum, F. subglutinans, F. sulphureum, F. tricinctum, F. verticillioides, F. virguliforme), Gaeumannomyces (e.g., G. graminis), Geotrichum (e.g., G. candidum), Gibberella (e.g., G. fujikuroi, G. pulicaris, G. stilboides, G. tricincta, G. xylarioides, G. zeae), Gilbertella (e.g., G. persicaria), Glomerella (e.g., G. cingulata), Gymnosporangium (e.g., G. juniperi-virginianae), Helminthosporium (e.g., H. oryzae, H. solani), Hemileia (e.g., H. coffeicola, H. vastatrix), Leptosphaeria (e.g., L. acuta, L. asparagi, L. cannabina, L. coffaeicida, L. coniothyrium, L. glyceriae, L. gossypii, L. grisea, L. longispora, L. maculans, L. maydis, L. musae, L. oryzicola, L. oryzina, L. pini, L. platanicola, L. pratensis, L. raphani, L. saccharicola, L. solani, L. solanicola, L. trifolii, L. viciae, L. woroninii, L. zeae, L. zeae-maydis), Macrophomina (e.g., M. phaseolina), Magnaporthe (e.g., M. grisea, M. oryzae), Melamspora (e.g., M. lini), Monilinia (e.g., M. fructicola), Mucor (e.g., M. piriformis), Mycosphaerella (e.g., M. fijiensis, M. graminicola, M. tassiana, M. zeae-maydis), Neofabraea (e.g., N. malicorticus), Ophiostoma (e.g., O. novo-ulmi, O. ulmi), Paracoccidioides (e.g., P. braziliensis), Penicillium (e.g., P. digitatum, P. expansum, P. italicum, P. rugulosum, P. verrucosum), Phakopsora (e.g., P. gossypii, P. meibomiae, P. pachyrhizi), Phialophora (e.g., P. gregata), Phoma (e.g., P. glycinicola), Phomopsis (e.g., P. asparagi, P. coffeae, P. logicolla, P. mangiferae, P. obscurans, P. perseae, P. purnorum, P. sojae, P. sclerotioides, P. tanakae, P. theae, P. vitcola), Phymatotrichopsis (e.g., P. omnivora), Physalospora (e.g., P. obtusa), Phytomyxea, Pneumocystis (e.g., P. carinii), Podosphaera (e.g., P. oxyacanthae), Pseudocercosporella, Puccinia (e.g., P. asparagi, P. cacahata, P. graminis, P. kuehnii, P. melanocephala, P. porri, P. punctiformis, P. recondita, P. schedonnardii, P. sessilis, P. sorghi, P. striiformis, P. tritici, P. triticina), Pyrenophora (e.g., P. tritici-repentis), Pyricularia, Rhizoctonia (e.g., R. solani), Rhizopus (e.g., R. nigricans, R. stolonifer), Rhynchosporium, Sclerotinia (e.g., S. borealis, S. bulborum, S. homoeocarpa, S. libertiana, S. minor, S. ricini, S. sclerotiorum, S. spermophila, S. trifoliorum), Sclerotium (e.g., S. rolfsii), Scopulariopsis (e.g., S. brevicaulis), Septoria (e.g., S. apiicola, S. aciculosa, S. ampelina, S. avenae, S. azalea, S. bataticola, S. campanulae, S. caryae, S. citri, S. cucurbitacearum, S. cytisi, S. dianthi, S. eumusae, fragariae, S. fragariaecola, S. glycines, S. helianthin, S. humuli, S. hydrangea, S. lactucae, S. lycopersici, S. malagutii, S. menthae, S. musiva, S. ostryae, S. passerinii, S. pisi, S. pistaciae, S. platanifolia, S. rhododendri, S. secais, S. selenophomoides), Sporisorium (e.g., S. scitamineum), Synchytrium (e.g., S. endobioticum), Taphrina (e.g., T. deformans), Thielaviopsis (e.g., T. basicola, T. ceremica), Tilletia (e.g., T. barclayana, T. caries, T. controversa, T. foetida, T. indica, T. laevis, T. tritici), Uncinula, Uromyces (e.g., U. melanocephala), Ustilago (e.g., U. esculenta, U. maydis, U. nuda, U. scitaminea, U. tritici, U. virens), Venturia, Verticillium (e.g., V. alfalfae, V. dahliae, V. isaacii, V. longisporum, V. theobromae, V. zaregamsianum) and/or Zymoseptoria (e.g., Z. tritici). Additional examples of fungi that may be targeted using proteins, formulations, polynucleotides and organisms of the present disclosure may be found in Bradley, Managing Diseases, in ILLINOIS AGRONOMY HANDBOOK (2008).

[1326] Compositions of the present disclosure may be used to prevent and/or treat gastropod infestations by, for example, reducing attraction of a gastropod to a surface, inhibiting inhabitation by a gastropod, inhibiting feeding of a gastropod, inhibiting the growth of a gastropod, inhibiting the reproduction and/or proliferation of a gastropod, degrading on one or more structural components of a gastropod (e.g. ______), killing a gastropod, and/or reducing one or more symptoms of a gastropod infestation. In some embodiments, such inhibition is complete or substantially complete, such that the gastropod fails to inhabit/feed/grow/reproduce/proliferate at a rate effective to initiate and/or sustain an appreciable infestation. For example, spraying a plant with an enzyme of the present disclosure may reduce the attractiveness of the plant to a gastropod, reduce a gastropod's desire/ability to inhabit the plant, inhibit a gastropod's desire/ability to feed on the plant, inhibiting the growth of a gastropod after it inhabits/feeds on the plant, inhibit the reproduction and/or proliferation of a gastropod on/in the plant, degrade one or more structural components of a gastropod (e.g. ______) on/in the plant, and/or kill a gastropod, thereby reducing one or more symptoms of infestation and/or enhancing one or more characteristics of growth and/or yield in the plant, as compared to an untreated control plant.

[1327] Compositions of the present disclosure may be used to prevent, treat, suppress, eliminate and/or reduce the severity of infestations of/by myriad gastropods, including, but not limited to, slugs and snails.

[1328] Compositions of the present disclosure may be used to prevent and/or treat insect infestations by, for example, reducing attraction of an insect to a surface, inhibiting entry of an insect into a material, inhibiting inhabitation by an insect, inhibiting feeding of an insect, inhibiting the growth of an insect, inhibiting the reproduction and/or proliferation of an insect, degrading on one or more structural components of an insect (e.g. procuticle components, such as chitin, and epicuticle components, such as lipoproteins, hydrocarbons, polyphenols and esters of fatty acids and alcohols), killing an insect, and/or reducing one or more symptoms of an insect infestation. In some embodiments, such inhibition is complete or substantially complete, such that the insect fails to inhabit/feed/grow/reproduce/proliferate at a rate effective to initiate and/or sustain an appreciable infestation. For example, spraying a plant with an enzyme of the present disclosure may reduce the attractiveness of the plant to an insect, reduce an insect's desire/ability to inhabit the plant, inhibit an insect's desire/ability to feed on the plant, inhibiting the growth of an insect after it inhabits/feeds on the plant, inhibit the reproduction and/or proliferation of an insect on/in the plant, degrade one or more structural components of an insect (e.g. one or more chitins, one or more lipoproteins and/or one or more long chain hydrocarbons) on/in the plant, and/or kill an insect, thereby reducing one or more symptoms of infestation and/or enhancing one or more characteristics of growth and/or yield in the plant, as compared to an untreated control plant.

[1329] Compositions of the present disclosure may be used to prevent and/or treat infestations of myriad insects, including, but not limited to, Coleoptera, Dermaptera, Diptera, Hemiptera, Homoptera, Hymenoptera, Lepidoptera, Orthoptera and Thysanoptera, such as aphids, armyworms, beetles, bollworms, bugs, caterpillars, cutworms, flies, moths and thrips. In some embodiments, enzymes of the present disclosure are used to prevent, treat, suppress, eliminate and/or reduce the severity of an infestation of by one or more Acalymma, Acanthaoscelides (e.g., A. obtectus,), Anasa (e.g., A. tristis), Anastrepha (e.g., A. ludens), Anoplophora (e.g., A. glabripennis), Anthonomus (e.g., A. eugenii), Acyrthosiphon (e.g., A. pisum), Bactrocera (e.g., B. dosalis), Bemisia (e.g., B. argentifolii, B. tabaci), Brevicoryne (e.g., B. brassicae), Bruchidius (e.g., B. atrolineatus), Bruchus (e.g., B. atomarius, B. dentipes, B. lentis, B. pisorum and/or B. rufipes), Callosobruchus (e.g., C. chinensis, C. maculatus, C. rhodesianus, C. subinnotatus, C. theobromae), Caryedon (e.g., C. serratus), Cassadinae, Ceratitis (e.g., C. capitata), Chrysomelinae, Circulfer (e.g., C. tenellus), Criocerinae, Cryptocephalinae, Cryptolestes (e.g., C. ferrugineus, C. pusillis, C. pussilloides), Cylas (e.g., C. formicarius), Delia (e.g., D. antiqua), Diabrotica, Diaphania (e.g., D. nitidalis), Diaphorina (e.g., D. citri), Donaciinae, Ephestia (e.g, E. cautella, E. elutella, E., keuhniella), Epilachna (e.g., E. varivestris), Epiphyas (e.g., E. postvittana), Eumolpinae, Galerucinae, Helicoverpa (e.g., H. zea), Heteroligus (e.g., H. meles), Iobesia (e.g., I. botrana), Lamprosomatinae, Lasioderma (e.g., L. serricorne), Leptinotarsa (e.g., L. decemlineata), Leptoglossus, Liriomyza (e.g., L. trifolii), Manducca, Melittia (e.g., M. cucurbitae), Myzus (e.g., M. persicae), Nezara (e.g., N. viridula), Orzaephilus (e.g., O. merator, O. surinamensis), Ostrinia (e.g., O. nubilalis), Phthorimaea (e.g., P. operculella), Pieris (e.g., P. rapae), Plodia (e.g., P. interpunctella), Plutella (e.g., P. xylostella), Popillia (e.g., P. japonica), Prostephanus (e.g., P. truncates), Psila, Rhizopertha (e.g., R. dominica), Rhopalosiphum (e.g., R. maidis), Sagrinae, Solenopsis (e.g., S. Invicta), Spilopyrinae, Sitophilus (e.g., S. granaries, S. oryzae and/or S. zeamais), Sitotroga (e.g., S. cerealella), Spodoptera (e.g., S. frugiperda), Stegobium (e.g., S. paniceum), Synetinae, Tenebrio (e.g., T. malens and/or T. molitor), Thrips (e.g., T. tabaci), Trialeurodes (e.g., T. vaporariorum), Tribolium (e.g., T. castaneum and/or T. confusum), Trichoplusia (e.g., T. ni), Trogoderma (e.g., T. granarium) and/or Trogossitidae (e.g., T. mauritanicus). Additional species of insects that may be targeted using enzymes, formulations, polynucleotides and organisms of the present disclosure may be found in CAPINERA, HANDBOOK OF VEGETABLE PESTS (2001) and Steffey and Gray, Managing Insect Pests, in ILLINOIS AGRONOMY HANDBOOK (2008).

[1330] Compositions of the present disclosure may be used to prevent, treat, suppress, eliminate and/or reduce the severity of nematode infestations/infections by, for example, inhibiting adhesion of a nematode to a surface, inhibiting entry of a nematode into a material, inhibiting habitation by a nematode, inhibiting the growth of a nematode, inhibiting the reproduction and/or proliferation of a nematode, degrading on one or more structural components of a nematode (e.g. cuticle components, such as collagens, cuticlins, glycoproteins and lipids), killing a nematode, and/or reducing one or more symptoms of a nematode infestation/infection. In some embodiments, such inhibition is complete or substantially complete, such that the nematode fails to inhabit/feed/grow/reproduce/proliferate at a rate effective to initiate and/or sustain an appreciable infestation/infection. For example, spraying a plant with an enzyme of the present disclosure may inhibit a nematode's ability to adhere to the surface of a plant, inhibit a nematode's ability to enter into the plant, inhibit a nematode's ability to inhabit the plant, inhibit growth of a nematode on/in the plant, inhibit the reproduction and/or proliferation of a nematode on/in the plant, degrade one or more structural components of a nematode (e.g., one or more collagens, one or more cuticlins, one or more glycoproteins and/or one or more lipids) on/in the plant, and/or kill a nematode, thereby reducing one or more symptoms of infestation and/or enhancing one or more characteristics of growth and/or yield in the plant, as compared to an untreated control plant.

[1331] Compositions of the present disclosure may be used to prevent, treat, suppress, eliminate and/or reduce the severity of infestations/infections of/by myriad phytopathogenic nematodes, including, but not limited to, root-knot nematodes, cyst nematodes, burrowing nematodes, root lesion nematodes, wilt nematodes and reniform nematodes. In some embodiments, enzymes of the present disclosure are used to prevent, treat, suppress, eliminate and/or reduce the severity of an infestation/infection of a plant or plant part by one or more Meloidogyne (e.g., M. arenaria, M. graminicola, M. hapla, M. incognita, M. javanica), Globodera (e.g., G. pallida, G. rostochiensis), Heterodera (e.g., H. avenae, H. filipjevi, H. glycines, H. schachtii), Pratylenchus (e.g., P. penetrans, P. thornei, P. neglectus, P. zae, P. vulnus, P. coffeae), Radopholus (e.g., R. similis), Ditylenchus (e.g., D. dipsaci, D. angustus, D. desctructor, D. africanus, D. myceliophagus, D. gigas), Bursaphelenchus (e.g., B. xylophilus, B. mucronatus), Rotylenchus (e.g., R. reniformis, R. parvus), Xiphinema (e.g., X. index, X. italiae, X. viuttenezi, X. diversicaudatun), and/or Nacobbus (e.g., N. aberrans). Additional examples of nematodes that may be targeted by enzymes, formulations, polynucleotides and organisms of the present disclosure may be found in CAPINERA, HANDBOOK OF VEGETABLE PESTS (2001) and Niblack, Nematodes, in ILLINOIS AGRONOMY HANDBOOK (2008)

[1332] Compositions of the present disclosure may be used to prevent and/or treat oomycete infestations/infections by, for example, inhibiting adhesion of an oomycete to a surface, inhibiting entry of an oomycete into a material, inhibiting habitation by an oomycete, inhibiting the growth of an oomycete, inhibiting the reproduction and/or proliferation of an oomycete, degrading on one or more structural components of an oomycete (e.g. cell wall components, such as celluloses and other beta-glucans), killing an oomycete, and/or reducing one or more symptoms of an oomycete infestation/infection. In some embodiments, such inhibition is complete or substantially complete, such that the oomycete fails to inhabit/feed/grow/reproduce/proliferate at a rate effective to initiate and/or sustain an appreciable infestation/infection. For example, spraying a plant with an enzyme of the present disclosure may inhibit an oomycete's ability to adhere to the surface of a plant, inhibit an oomycete's ability to enter into the plant, inhibit an oomycete's ability to inhabit the plant, inhibit growth of an oomycete on/in the plant, inhibit the reproduction and/or proliferation of an oomycete on/in the plant, degrade one or more structural components of an oomycete (e.g. one or more beta-glucans) on/in the plant, and/or kill an oomycete, thereby reducing one or more symptoms of infestation and/or enhancing one or more characteristics of growth and/or yield in the plant, as compared to an untreated control plant.

[1333] Compositions of the present disclosure may be used to prevent and/or treat infestations/infections of myriad phytopathogenic oomycetes, including, but not limited to, phytopathogenic Albuginaceae, Peronosporaceae and Pythiaceae, such as blights, mildews, molds, root rots and rusts In some embodiments, proteins of the present disclosure are used to prevent, treat, suppress, eliminate and/or reduce the severity of an infestation/infection of a plant or plant part by one or more Achlya, Albugo (e.g., A. candida), Aphanomyces (e.g., A. cochlioides, A. euteiches, A. invadans, A. iridis, A. raphani), Bremia (e.g., B. lactucae), Hyaloperonospora (e.g., H. arabidopsidis), Peronospora (e.g., P. belbahrii, P. destructor, P. effusa, P. farinose, P. fulva, P. lotorum, P. manshurica, P. parasitica, P. potentillae, P. rubi, P. schachtii, P. sparsa, P. tabacina, P. trifolii, P. viciae), Phytophthora (e.g., P. agathidicia, P. boehmeriae, P. cactorum, P. cambivora, P. capsica, P. cinnamomi, P. citricola, P. citrophthora, P. cryptogea, P. drechsleri, P. erythroseptica, P. fragariae, P. heveae, P. infestans, P. kernoviae, P. lateralis, P. megakaryam P. megasperma, P. nicotianae, P. palmivora, P. parasitica, P. ramorum, P. sojae, P. syringae), Plasmopara (e.g., P. halstedii, P. viticola), Pseudeoperonospora (e.g., P. cubensis, P. humuli), Pseudosclerospora (e.g., P. philippinesis, P. sacchari, P. sorghi), Pythium (e.g., P. acanthicum, P. aphanidermatum, P. aristosporum, P. arrhenomanes, P. butleri, P. chondricola, P. citrinum, P. cucurbitacearum, P. debaryanum, P. delicense, P. emineosum, P. graminicola, P. heterothallicum, P. hypogynum, P. insidiosum, P. irregulare, P. iwayamae, P. middletonii, P. myriotylum, P. okanoganense, P. oopapillum, P. paddicum, P. paroecandrum, P. perniciosum, P. porphyrae, P. rostratum, P. scleroteichum, P. spinosum, P. splendens, P. sulcatum, P. tardicrescens, P. tracheiphilum, P. ultimum, P. violae, P. volutum), Saprolegnia (e.g., S. parasitica), Sclerophthora (e.g., S. macrospora, S. rayssiae) and/or Sclerospora (e.g., S. graminicola). Additional examples of fungi that may be targeted using proteins, formulations, polynucleotides and organisms of the present disclosure may be found in Bradley, Managing Diseases, in ILLINOIS AGRONOMY HANDBOOK (2008).

[1334] Compositions of the present disclosure may be particularly useful for preventing, treating, suppressing, eliminating and/or reducing the severity of infestations/infections of/by phytopathogenic fungi and oomycetes, such as Albugo (e.g., A. candida, A. occidentalis), Alternaria (e.g., A. alternata, A. alternantherae, A. arachidis, A. arborescens, A. arbusti, A. blumeae, A. brassicae, A. brassicicola, A. burnsii. A. carotiincultae, A. carthami, A. celosiae, A. cinerariae, A. citri, A. conjuncta, A. cucumerina, A. dauci, A. dianthi, A. dianthicola, A. eichhorniae, A. euphorbiicola, A. gaisen, A. helianthi, A. helianthicola, A. hungarica, A. infectoria, A. japonica, A. leucanthemi, A. linicola, A. longipes, A. mali, A. molesta, A. padwickii, A. panax, A. perpunctulata, A. patroselini, A. porri, A. quericola, A. radicina, A. raphani, A. saponariae, A. selini, A. senecionis, A. smyrnii, A. solani, A. sonchi, A. tenuissima, A. triticina, A. ventricosa, A. zinniae), Blumeria (e.g., B. graminis), Botrytis (e.g., B. aclada, B. allii, B. cinerea, B. elliptica, B. fabae, B. squamosa), Ceratocystis (e.g., C. fimbriata), Colletotrichum, Diplodia (e.g., D. gossypina), Erwinia (e.g., E. amylovora, E. aphidicola, E. carotovora, E. chrysanthemi, E. papayae, E. persicina, E. psidii, E. pyrifoliae, E. rhapontici, E. tracheiphila), Fusarium (e.g., F. graminearum, F. oxysporum, F. solani, F. virguliforme), Geotrichum (e.g., G. candidum), Gibberella (e.g., G. fujikuroi, G. pulicaris, G. zeae), Gilbertella (e.g., G. persicaria), Glomerella (e.g., G. cingulata), Hyaloperonospora (e.g., H. arabidopsidis), Macrophomina (e.g., M. phaseolina), Magnaporthe (e.g., M. grisea, M. oryzae), Melampsora (e.g., M. lini), Monilinia (e.g., M. fructicola), Mucor (e.g., M. piriformis), Mycosphaerella (e.g., M. graminicola), Neofabraea (e.g., N. malicorticus), Penicillium (e.g., P. digitatum, P. expansum, P. italicum, P. rugulosum, P. verrucosum), Phakopsora (e.g., P. pachyrhizi), Physalospora (e.g., P. obtusa), Phytophthora (e.g., P. capsici, P. cinnamomi, P. infestans, P. parasitica, P. ramorum, P. sojae), Plasmopara (e.g., P. viticola), Pseudoperonospora (e.g., P. cubensis), Puccinia (e.g., P. asparagi, P. cacahata, P. graminis, P. kuehnii, P. melanocephala, P. porri, P. punctiformis, P. recondita, P. schedonnardii, P. sessilis, P. sorghi, P. striiformis, P. tritici, P. triticina), Pythium (e.g., P. butleri, P. ultimum), Rhizoctonia (e.g., R. solani), Rhizopus (e.g., R. nigricans, R. stolonifer), Sclerotinia (e.g., S. borealis, S. bulborum, S. homoeocarpa, S. libertiana, S. minor, S. ricini, S. sclerotiorum, S. spermophila, S. trifoliorum), Septoria (e.g., S. cucurbitacearum, S. glycines, S. lycospersici), Ustilago (e.g., U. esculenta, U. maydis, U. nuda), Zymoseptoria (e.g., Z. tritici).

[1335] Blast infestations/infections, such as those mediated by Magnaporthe (e.g., M. grisea, M. oryzae), may be prevented, treated, suppressed and/or eliminated with myriad compositions of the present disclosure, including, but not limited to, proteins exhibiting one or more activities belonging to EC 1.1.3 (e.g., 1.1.3.4, 1.1.3.25), 1.11.1 (e.g., 1.11.1.6), 3.2.1 (e.g., 3.2.1.6) and/or 3.4.21 (and corresponding formulations, polynucleotides and organisms). In some embodiments, such infestations/infections may be prevented, treated, suppressed and/or eliminated using one or more of SEQ ID NOs: 1, 2, 5, 6, 10, 11, 14, 21, 99, 101, 116, 126, and enzymatically active fragments/mutants/variants thereof.

[1336] In some embodiments, such infestations/infections may be prevented, treated, suppressed and/or eliminated using a combination of enzymes, such as one or more cellulases, one or more hemicellulases and one or more xylanases; one or more peptidases and one or more proteases; one or more cellulases, one or more glucosidases and one or more xylanases.

[1337] Blight infestations/infections, such as those mediated by Alternaria (e.g., A. alternata, A. carotiincultae, A. panax, A. petroselini, A. solani, A. triticina), Colletotrichum, Fusarium (e.g., F. graminearum), Gibberella (e.g., G. zeae), Phytophthora (e.g., P. capsici, P. infestans, P. ramorum), may be prevented, treated, suppressed and/or eliminated with myriad compositions of the present disclosure, including, but not limited to, proteins exhibiting one or more activities belonging to EC 1.1.3 (e.g., 1.1.3.4, 1.1.3.25), 1.10.3 (e.g., 1.10.3.2), 1.11.1 (e.g., 1.11.1.6), 3.1.1 (e.g., 3.1.1.5), 3.2.1 (e.g., 3.2.1.1, 3.2.1.3, 3.2.1.4, 3.2.1.5, 3.2.1.6, 3.2.1.8, 3.2.1.11, 3.2.1.15, 3.2.1.39, 3.2.1.41, 3.2.1.58, 3.2.1.75, 3.2.1.78, 3.2.1.111), 3.4.11 (e.g., 3.4.11.1), 3.4.21 (e.g., 3.4.21.19, 3.4.21.62) and/or 3.4.24 (e.g., 3.4.24.28) (and corresponding formulations, polynucleotides and organisms). In some embodiments, such infestations/infections may be prevented, treated, suppressed and/or eliminated using one or more of SEQ ID NOs: 1, 6, 9, 10, 11, 12, 13, 14, 15, 16, 17, 19, 20, 21, 22, 24, 25, 29, 33, 42, 43, 44, 45, 46, 48, 99, 100, 101, 105, 109, 110, 114, 116, 117, 125, 126, 132, 149, and enzymatically active fragments/mutants/variants thereof. In some embodiments, such infestations/infections may be prevented, treated, suppressed and/or eliminated using a combination of enzymes, such as two or more cellulases; two or more pectinases; two or more glucanases; two or more peptidases; two or more pectinases; one or more cellulases, one or more hemicellulases and one or more xylanases; one or more glucanses and one or more xylanases; one or more amylases, one or more glucanases and one or more xylanases.

[1338] Blotch infestations/infections, such as those mediated by Mycosphaerella (e.g., M. graminicola) and Zymoseptoria (e.g., Z. tritici) may be prevented, treated, suppressed and/or eliminated with myriad compositions of the present disclosure, including, but not limited to, proteins exhibiting one or more activities belonging to EC 1.1.3 (e.g., 1.1.3.4, 1.1.3.25), 1.10.3 (e.g., 1.10.3.2), 1.11.1 (e.g., 1.11.1.6), 3.1.1 (e.g., 3.1.1.5), 3.2.1 (e.g., 3.2.1.1, 3.2.1.3, 3.2.1.6, 3.2.1.8, 3.2.1.11, 3.2.1.15, 3.2.1.39, 3.2.1.41, 3.2.1.58, 3.2.1.75, 3.2.1.78, 3.2.1.101, 3.2.1.109, 3.2.1.110, 3.2.1.112), 3.4.11 (e.g., 3.4.11.1), 3.4.21 (e.g., 3.4.21.62) and/or 3.4.24 (3.4.24.28) (and corresponding formulations, polynucleotides and organisms). In some embodiments, such infestations/infections may be prevented, treated, suppressed and/or eliminated using one or more of SEQ ID NOs: 1, 6, 9, 10, 11, 13, 14, 15, 17, 21, 22, 24, 25, 29, 42, 44, 45, 48, 101, 103, 114, 149, and enzymatically active fragments/mutants/variants thereof. In some embodiments, such infestations/infections may be prevented, treated, suppressed and/or eliminated using a combination of enzymes, such as one or more cellulases, one or more lyases and one or more pectinases; as one or more cellulases, one or more hemicellulases and one or more xylanases; two or more cellulases; two or more glucanases; two or more pectinases; one or more glucanses and one or more xylanases; one or more peptidases and one or more proteases.

[1339] Downy mildew infestations/infections, such as those mediated by Bremia (e.g., B. lactucae), Hyaloperonospora (e.g., H. arabidopsidis, H. parasitica), Peronospora (e.g., P. belbahrii, P. destructor, P. effusa, P. farinose, P. fulva, P. lotorum, P. manshurica, P. parasitica, P. potentillae, P. rubi, P. schachtii, P. sparsa, P. tabacina, P. trifolii, P. viciae), Peronosclerospora, Plasmopara (e.g., P. halstedii, P. viticola) and Pseudoperonospora (e.g., P. cubensis, P. humuli), may be prevented, treated, suppressed and/or eliminated with myriad compositions of the present disclosure, including, but not limited to, proteins exhibiting one or more activities belonging to EC 3.2.1. (e.g., 3.2.1.8, 3.2.1.78) and/or 3.4.21 (e.g., 3.4.21.19, 3.4.21.62) (and corresponding formulations, polynucleotides and organisms). In some embodiments, such infestations/infections may be prevented, treated, suppressed and/or eliminated using one or more of SEQ ID NOs: 22, 42, 43, 44, 45, and enzymatically active fragments/mutants/variants thereof.

[1340] Powdery mildew infestations/infections, such as those mediated by Blumeria (e.g., B. graminis), Erysiphe (e.g., E. cichoracearum, E. necator), Golovinomyces, Leveillula (e.g., L. taurica), Microsphaera (e.g., M. diffusa), Oidium, Phyllactinia, Podosphaera (e.g., P. aphanis, P. leucotricha, P. pannosa, P. xanthii), Sphaerotheca and Uncinula, may be prevented, treated, suppressed and/or eliminated with myriad compositions of the present disclosure, including, but not limited to, proteins exhibiting one or more activities belonging to EC 1.1.3 (e.g., 1.1.3.4), 3.2.1 (e.g., 3.2.1.8, 3.2.15) and/or 3.4.21 (and corresponding formulations, polynucleotides and organisms). In some embodiments, such infestations/infections may be prevented, treated, suppressed and/or eliminated using one or more of SEQ ID NOs: 1, 10, 22, 42, and enzymatically active fragments/mutants/variants thereof. In some embodiments, such infestations/infections may be prevented, treated, suppressed and/or eliminated using a combination of enzymes, such as two or more pectinases.

[1341] Mold infestations/infections, such as those mediated by Botrytis (e.g., B. cinerea, B. elliptica), Penicillium (e.g., P. digitatum), Phytophthora (e.g., P. capsici, P. cinnamomi, P. ramorum, P. sojae), may be prevented, treated, suppressed and/or eliminated with myriad compositions of the present disclosure, including, but not limited to, proteins exhibiting one or more activities belonging to EC 1.1.3 (e.g., 1.1.3.4, 1.1.3.25), 1.10.3 (e.g., 1.10.3.2), 1.11.1 (e.g., 1.11.1.6, 1.11.1.7), 3.2.1 (e.g., 3.2.1.1, 3.2.1.3, 3.2.1.4, 3.2.1.5, 3.2.1.6, 3.2.1.8, 3.2.1.11, 3.2.1.15, 3.2.1.17, 3.2.1.39, 3.2.1.41, 3.2.1.58, 3.2.1.75, 3.2.1.109, 3.2.1.110, 3.2.1.111, 3.2.1.112), 3.4.11 (e.g., 3.4.11.1), 3.4.21 (e.g., 3.4.21.62) and/or 3.4.24 (e.g., 3.4.24.28) (and corresponding formulations, polynucleotides and organisms). In some embodiments, such infestations/infections may be prevented, treated, suppressed and/or eliminated using one or more of SEQ ID NOs: 1, 6, 9, 10, 11, 12, 13, 14, 16, 17, 20, 21, 22, 24, 25, 29, 33, 41, 42, 44, 45, 48, 99, 101, 102, 111, 116, 119, 126, 129, 149, and enzymatically active fragments/mutants/variants thereof. In some embodiments, such infestations/infections may be prevented, treated, suppressed and/or eliminated using a combination of enzymes, such as two or more cellulases; two or more pectinases; one or more cellulases, one or more hemicellulases and one or more xylanases; one or more peptidases and one or more proteases; one or more amylases, one or more glucanases and one or more bacillolysins; one or more cellulases, one or more hemicellulases and one or more xylanases; two or more peptidases; one or more glucanses and one or more xylanases; one or more peptidases and one or more proteases; one or more cellulases, one or more glucosidases and one or more xylanases; one or more cellulases, one or more furanosidases and one or more xylanases.

[1342] Crown/fruit/root/stem rot infestations/infections, such as those mediated by Colletotrichum, Fusarium (e.g., F. solani, F. virgulforme), Phytophthora (e.g., P. capsica, P. cinnamomi, P. nicotianae, P. parasitica, P. sojae), Pythium (e.g., P. graminicola, P. ultimum), Saprolegnia (e.g., S. parasitica), may be prevented, treated, suppressed and/or eliminated with myriad compositions of the present disclosure, including, but not limited to, proteins exhibiting one or more activities belonging to EC 1.1.3 (e.g., 1.1.3.4, 1.1.3.25), 1.11.1 (e.g., 1.11.1.6), 3.2.1 (e.g., 3.2.1.6, 3.2.1.8, 3.2.1.11, 3.2.1.39, 3.2.1.58, 3.2.1.75, 3.2.1.109, 3.2.1.110, 3.2.1.111) and/or 3.4.21 (e.g., 3.4.21.19) (and corresponding formulations, polynucleotides and organisms). In some embodiments, such infestations/infections may be prevented, treated, suppressed and/or eliminated using one or more of SEQ ID NOs: 1, 6, 9, 10, 11, 12, 13, 14, 15, 16, 17, 20, 21, 22, 24, 25, 29, 41, 42, 43, 44, 45, 48, and enzymatically active fragments/mutants/variants thereof. In some embodiments, such infestations/infections may be prevented, treated, suppressed and/or eliminated using a combination of enzymes, such as two or more cellulases; two or more pectinases; two or more glucanases; two or more peptidases; one or more amylases, one or more glucanases and one or more bacillolysins; one or more cellulases, one or more lyases and one or more pectinases; one or more cellulases, one or more hemicellulases and one or more xylanases; one or more glucanses and one or more xylanases; one or more peptidases and one or more proteases.

[1343] Rust infestations/infections, such as those mediated by Albugo (e.g., A. candida, A. occidentalis), Hemileia (e.g., H. coffeicola, H. vastatrix), Melamspora (e.g., M. lini), Phakopsora (e.g., P. meibomiae, P. pachyrhizi), Puccinia (e.g., P. asparagi, P. cacahata, P. graminis, P. kuehnii, P. melanocephala, P. porri, P. punctiformis, P. recondita, P. schedonnardii, P. sessilis, P. sorghi, P. striiformis, P. tritici, P. triticina) and Uromyces (e.g., U. appendiculatus), may be prevented and/or treated with myriad compositions of the present disclosure, including, but not limited to, proteins exhibiting one or more activities belonging to EC 1.1.3 (e.g., 1.1.3.4), 1.10.3 (e.g., 1.10.3.2), 3.1.1 (e.g., 3.1.1.5), 3.2.1 (e.g., 3.2.1.1, 3.2.1.3, 3.2.1.4, 3.2.1.5, 3.2.1.6, 3.2.1.8, 3.2.1.15, 3.2.1.41, 3.2.1.58, 3.2.1.78), 3.4.11 (e.g., 3.4.11.1), 3.4.21 (e.g., 3.4.21.19, 3.4.21.62) and/or 3.4.24 (e.g., 3.4.24.28) (and corresponding formulations, polynucleotides and organisms). In some embodiments, such infestations/infections may be prevented, treated, suppressed and/or eliminated using one or more of SEQ ID NOs: 1, 9, 13, 15, 16, 17, 19, 20, 23, 24, 29, 33, 42, 43, 44, 45, 46, 48, and enzymatically active fragments/mutants/variants thereof. In some embodiments, such infestations/infections may be prevented, treated, suppressed and/or eliminated using a combination of enzymes, such as two or more glucanases; one or more peptidases and one or more proteases; and one or more amylases, one or more glucanases and one or more bacillolysins Wilt infestations/infections, such as those mediated by Fusarium (e.g., F. oxysporum,), Phytophthora (e.g., P. capsici, P. infestans, P. ramorum), may be prevented, treated, suppressed and/or eliminated with myriad compositions of the present disclosure, including, but not limited to, proteins exhibiting one or more activities belonging to EC 1.1.3 (e.g., 1.1.3.4, 1.1.3.25), 1.10.3 (e.g., 1.10.3.2), 1.11.1 (e.g., 1.11.1.6), 3.1.1 (e.g., 3.1.1.5), 3.2.1 (e.g., 3.2.1.1, 3.2.1.3, 3.2.1.4, 3.2.1.5, 3.2.1.6, 3.2.1.8, 3.2.1.11, 3.2.1.15, 3.2.1.39, 3.2.1.41, 3.2.1.58, 3.2.1.75, 3.2.1.78, 3.2.1.111), 3.4.11 (e.g., 3.4.11.1), 3.4.21 (e.g., 3.4.21.19, 3.4.21.62) and/or 3.4.24 (e.g., 3.4.24.28) (and corresponding formulations, polynucleotides and organisms). In some embodiments, such infestations/infections may be prevented, treated, suppressed and/or eliminated using one or more of SEQ ID NOs: 1, 6, 9, 10, 11, 12, 13, 14, 15, 16, 17, 19, 20, 21, 22, 24, 25, 33, 42, 43, 44, 45, 46, 48, 99, 101, 114, 116, 125, 126, and enzymatically active fragments/mutants/variants thereof.

[1344] In some embodiments, such infestations/infections may be prevented, treated, suppressed and/or eliminated using a combination of enzymes, such as two or more cellulases; two or more pectinases; two or more glucanases; two or more peptidases; two or more pectinases; one or more cellulases, one or more hemicellulases and one or more xylanases; one or more glucanses and one or more xylanases; one or more amylases, one or more glucanases and one or more xylanases.

[1345] Proteins exhibiting activity belonging to EC 1.1 (and corresponding formulations, polynucleotides and organisms) may be particularly useful for preventing, treating, suppressing, eliminating and/or reducing the severity of infestations/infections of a plant or plant part by Blumeria (e.g., B. graminis), Botrytis (e.g., B. cinerea), Fusarium (e.g., F. graminearum, F. oxysporum, F. virgulforme), Magnaporthe (e.g., M. grisea, M. oryzae), Phakopsora (e.g., P. pachyrhizi), Phytophthora (e.g., P. capsici, P. cinnamomi, P. infestans, P. parasitica, P. ramorum, P. sojae) and Zymoseptoria (e.g., Z. tritici). Proteins comprising, consisting essentially of or consisting of an amino acid sequence that is about/at least 60, 61, 62, 63, 64, 65, 66, 67, 68, 69, 70, 71, 72, 73, 74, 75, 76, 77, 78, 79, 80, 81, 82, 83, 84, 85, 86, 87, 88, 89, 90, 91, 92, 93, 94, 95, 96, 97, 98, 99 or 100% identical to one or more of the amino acid sequences set forth herein as SEQ ID NOs: 1-8 (and corresponding formulations, polynucleotides and organisms) may be especially useful for preventing, treating, suppressing, eliminating and/or reducing the severity of such infestations/infections.

[1346] Proteins exhibiting activity belonging to EC 1.1.3 (and corresponding formulations, polynucleotides and organisms) may be particularly useful for preventing, treating, suppressing, eliminating and/or reducing the severity of infestations/infections of a plant or plant part by Blumeria (e.g., B. graminis), Botrytis (e.g., B. cinerea), Fusarium (e.g., F. graminearum, F. oxysporum, F. virgulforme), Magnaporthe (e.g., M. grisea, M. oryzae), Phakopsora (e.g., P. pachyrhizi), Phytophthora (e.g., P. capsici, P. cinnamomi, P. infestans, P. parasitica, P. ramorum, P. sojae) and Zymoseptoria (e.g., Z. tritici). Proteins comprising, consisting essentially of or consisting of an amino acid sequence that is about/at least 60, 61, 62, 63, 64, 65, 66, 67, 68, 69, 70, 71, 72, 73, 74, 75, 76, 77, 78, 79, 80, 81, 82, 83, 84, 85, 86, 87, 88, 89, 90, 91, 92, 93, 94, 95, 96, 97, 98, 99 or 100% identical to one or more of the amino acid sequences set forth herein as SEQ ID NOs: 1-8 (and corresponding formulations, polynucleotides and organisms) may be especially useful for preventing, treating, suppressing, eliminating and/or reducing the severity of such infestations/infections.

[1347] Proteins exhibiting belonging to EC 1.1.3.4 (and corresponding formulations, polynucleotides and organisms) may be particularly useful for preventing, treating, suppressing, eliminating and/or reducing the severity of infestations/infections of a plant or plant part by Blumeria (e.g., B. graminis), Botrytis (e.g., B. cinerea), Fusarium (e.g., F. graminearum, F. oxysporum, F. virgulforme), Magnaporthe (e.g., M. grisea, M. oryzae), Phakopsora (e.g., P. pachyrhizi), Phytophthora (e.g., P. capsici, P. cinnamomi, P. infestans, P. parasitica, P. ramorum, P. sojae) and Zymoseptoria (e.g., Z. tritici). Proteins comprising, consisting essentially of or consisting of an amino acid sequence that is about/at least 60, 61, 62, 63, 64, 65, 66, 67, 68, 69, 70, 71, 72, 73, 74, 75, 76, 77, 78, 79, 80, 81, 82, 83, 84, 85, 86, 87, 88, 89, 90, 91, 92, 93, 94, 95, 96, 97, 98, 99 or 100% identical to one or more of the amino acid sequences set forth herein as SEQ ID NOs: 1-5 (and corresponding formulations, polynucleotides and organisms) may be especially useful for preventing, treating, suppressing, eliminating and/or reducing the severity of such infestations/infections.

[1348] Proteins exhibiting activity belonging to EC 1.1.3.25 (now included in EC 1.1.99.18) (and corresponding formulations, polynucleotides and organisms) may be particularly useful for preventing, treating, suppressing, eliminating and/or reducing the severity of infestations/infections of a plant or plant part by Botrytis (e.g., B. cinerea), Fusarium (e.g., F. graminearum, F. oxysporum, F. virguliforme), Magnaporthe (e.g., M. grisea, M. oryzae), Phytophthora (e.g., P. capsici, P. cinnamomi, P. infestans, P. parasitica, P. ramorum, P. sojae) and Zymoseptoria (e.g., Z. tritici). Proteins comprising, consisting essentially of or consisting of an amino acid sequence that is about/at least 60, 61, 62, 63, 64, 65, 66, 67, 68, 69, 70, 71, 72, 73, 74, 75, 76, 77, 78, 79, 80, 81, 82, 83, 84, 85, 86, 87, 88, 89, 90, 91, 92, 93, 94, 95, 96, 97, 98, 99 or 100% identical to one or more of the amino acid sequences set forth herein as SEQ ID NOs: 6-8 (and corresponding formulations, polynucleotides and organisms) may be especially useful for preventing, treating, suppressing, eliminating and/or reducing the severity of such infestations/infections.

[1349] Proteins exhibiting activity belonging to belonging to EC 1.10 (and corresponding formulations, polynucleotides and organisms) may be particularly useful for preventing, treating, suppressing, eliminating and/or reducing the severity of infestations/infections of a plant or plant part by Botrytis (e.g., B. cinerea), Fusarium (e.g., F. graminearum, F. oxysporum, F. virguliforme), Phakopsora (e.g., P. pachyrhizi) and Zymoseptoria (e.g., Z. tritici). Proteins comprising, consisting essentially of or consisting of an amino acid sequence that is about/at least 60, 61, 62, 63, 64, 65, 66, 67, 68, 69, 70, 71, 72, 73, 74, 75, 76, 77, 78, 79, 80, 81, 82, 83, 84, 85, 86, 87, 88, 89, 90, 91, 92, 93, 94, 95, 96, 97, 98, 99 or 100% identical to one or more of the amino acid sequences set forth herein as SEQ ID NOs: 9 (and corresponding formulations, polynucleotides and organisms) may be especially useful for preventing, treating, suppressing, eliminating and/or reducing the severity of such infestations/infections.

[1350] Proteins exhibiting activity belonging to belonging to EC 1.10.3 (and corresponding formulations, polynucleotides and organisms) may be particularly useful for preventing, treating, suppressing, eliminating and/or reducing the severity of infestations/infections of a plant or plant part by Botrytis (e.g., B. cinerea), Fusarium (e.g., F. graminearum, F. oxysporum, F. virguliforme), Phakopsora (e.g., P. pachyrhizi) and Zymoseptoria (e.g., Z. tritici). Proteins comprising, consisting essentially of or consisting of an amino acid sequence that is about/at least 60, 61, 62, 63, 64, 65, 66, 67, 68, 69, 70, 71, 72, 73, 74, 75, 76, 77, 78, 79, 80, 81, 82, 83, 84, 85, 86, 87, 88, 89, 90, 91, 92, 93, 94, 95, 96, 97, 98, 99 or 100% identical to one or more of the amino acid sequences set forth herein as SEQ ID NOs: 9 (and corresponding formulations, polynucleotides and organisms) may be especially useful for preventing, treating, suppressing, eliminating and/or reducing the severity of such infestations/infections.

[1351] Proteins exhibiting activity belonging to belonging to EC 1.10.3.2 (and corresponding formulations, polynucleotides and organisms) may be particularly useful for preventing, treating, suppressing, eliminating and/or reducing the severity of infestations/infections of a plant or plant part by Botrytis (e.g., B. cinerea), Fusarium (e.g., F. graminearum, F. oxysporum, F. virguliforme), Phakopsora (e.g., P. pachyrhizi) and Zymoseptoria (e.g., Z. tritici). Proteins comprising, consisting essentially of or consisting of an amino acid sequence that is about/at least 60, 61, 62, 63, 64, 65, 66, 67, 68, 69, 70, 71, 72, 73, 74, 75, 76, 77, 78, 79, 80, 81, 82, 83, 84, 85, 86, 87, 88, 89, 90, 91, 92, 93, 94, 95, 96, 97, 98, 99 or 100% identical to one or more of the amino acid sequences set forth herein as SEQ ID NOs: 9 (and corresponding formulations, polynucleotides and organisms) may be especially useful for preventing, treating, suppressing, eliminating and/or reducing the severity of such infestations/infections.

[1352] Proteins exhibiting activity belonging to EC 1.11 (and corresponding formulations, polynucleotides and organisms) may be particularly useful for preventing, treating, suppressing, eliminating and/or reducing the severity of infestations/infections of a plant or plant part by Botrytis (e.g., B. cinerea), Fusarium (e.g., F. graminearum, F. oxysporum, F. virgulforme), Magnaporthe (e.g., M. grisea, M. oryzae), Phytophthora (e.g., P. capsici, P. cinnamomi, P. infestans, P. parasitica, P. ramorum, P. sojae) and Zymoseptoria (e.g., Z. tritici). Proteins comprising, consisting essentially of or consisting of an amino acid sequence that is about/at least 60, 61, 62, 63, 64, 65, 66, 67, 68, 69, 70, 71, 72, 73, 74, 75, 76, 77, 78, 79, 80, 81, 82, 83, 84, 85, 86, 87, 88, 89, 90, 91, 92, 93, 94, 95, 96, 97, 98, 99 or 100% identical to one or more of the amino acid sequences set forth herein as SEQ ID NOs: 10-12 (and corresponding formulations, polynucleotides and organisms) may be especially useful for preventing, treating, suppressing, eliminating and/or reducing the severity of such infestations/infections.

[1353] Proteins exhibiting activity belonging to EC 1.11.1 (and corresponding formulations, polynucleotides and organisms) may be particularly useful for preventing, treating, suppressing, eliminating and/or reducing the severity of infestations/infections of a plant or plant part by Botrytis (e.g., B. cinerea), Fusarium (e.g., F. graminearum, F. oxysporum, F. virgulforme), Magnaporthe (e.g., M. grisea, M. oryzae), Phytophthora (e.g., P. capsici, P. cinnamomi, P. infestans, P. parasitica, P. ramorum, P. sojae) and Zymoseptoria (e.g., Z. tritici). Proteins comprising, consisting essentially of or consisting of an amino acid sequence that is about/at least 60, 61, 62, 63, 64, 65, 66, 67, 68, 69, 70, 71, 72, 73, 74, 75, 76, 77, 78, 79, 80, 81, 82, 83, 84, 85, 86, 87, 88, 89, 90, 91, 92, 93, 94, 95, 96, 97, 98, 99 or 100% identical to one or more of the amino acid sequences set forth herein as SEQ ID NOs: 10-12 (and corresponding formulations, polynucleotides and organisms) may be especially useful for preventing, treating, suppressing, eliminating and/or reducing the severity of such infestations/infections.

[1354] Proteins exhibiting activity belonging to EC 1.11.1.6 (and corresponding formulations, polynucleotides and organisms) may be particularly useful for preventing, treating, suppressing, eliminating and/or reducing the severity of infestations/infections of a plant or plant part by Botrytis (e.g., B. cinerea), Fusarium (e.g., F. graminearum, F. oxysporum, F. virguliforme), Magnaporthe (e.g., M. grisea, M. oryzae), Phytophthora (e.g., P. capsici, P. cinnamomi, P. infestans, P. parasitica, P. ramorum, P. sojae) and Zymoseptoria (e.g., Z. tritici). Proteins comprising, consisting essentially of or consisting of an amino acid sequence that is about/at least 60, 61, 62, 63, 64, 65, 66, 67, 68, 69, 70, 71, 72, 73, 74, 75, 76, 77, 78, 79, 80, 81, 82, 83, 84, 85, 86, 87, 88, 89, 90, 91, 92, 93, 94, 95, 96, 97, 98, 99 or 100% identical to one or more of the amino acid sequences set forth herein as SEQ ID NOs: 10-11 (and corresponding formulations, polynucleotides and organisms) may be especially useful for preventing, treating, suppressing, eliminating and/or reducing the severity of such infestations/infections.

[1355] Proteins exhibiting activity belonging to EC 1.11.1.7 (and corresponding formulations, polynucleotides and organisms) may be particularly useful for preventing, treating, suppressing, eliminating and/or reducing the severity of infestations/infections of a plant or plant part by Botrytis (e.g., B. cinerea). Proteins comprising, consisting essentially of or consisting of an amino acid sequence that is about/at least 60, 61, 62, 63, 64, 65, 66, 67, 68, 69, 70, 71, 72, 73, 74, 75, 76, 77, 78, 79, 80, 81, 82, 83, 84, 85, 86, 87, 88, 89, 90, 91, 92, 93, 94, 95, 96, 97, 98, 99 or 100% identical to one or more of the amino acid sequences set forth herein as SEQ ID NOs: 12 (and corresponding formulations, polynucleotides and organisms) may be especially useful for preventing, treating, suppressing, eliminating and/or reducing the severity of such infestations/infections.

[1356] Proteins exhibiting activity belonging to EC 1.14 (and corresponding formulations, polynucleotides and organisms) may be particularly useful for preventing, treating, suppressing, eliminating and/or reducing the severity of infestations/infections of a plant or plant part by Botrytis (e.g., B. cinerea), Fusarium (e.g., F. graminearum, F. oxysporum, F. virgulforme), Magnaporthe (e.g., M. grisea, M. oryzae), Phytophthora (e.g., P. capsici, P. cinnamomi, P. infestans, P. parasitica, P. ramorum, P. sojae) and Zymoseptoria (e.g., Z. tritici). Proteins comprising, consisting essentially of or consisting of an amino acid sequence that is about/at least 60, 61, 62, 63, 64, 65, 66, 67, 68, 69, 70, 71, 72, 73, 74, 75, 76, 77, 78, 79, 80, 81, 82, 83, 84, 85, 86, 87, 88, 89, 90, 91, 92, 93, 94, 95, 96, 97, 98, 99 or 100% identical to one or more of the amino acid sequences set forth herein as SEQ ID NOs: 99 (and corresponding formulations, polynucleotides and organisms) may be especially useful for preventing, treating, suppressing, eliminating and/or reducing the severity of such infestations/infections.

[1357] Proteins exhibiting activity belonging to EC 1.14.99 (and corresponding formulations, polynucleotides and organisms) may be particularly useful for preventing, treating, suppressing, eliminating and/or reducing the severity of infestations/infections of a plant or plant part by Botrytis (e.g., B. cinerea), Fusarium (e.g., F. graminearum, F. oxysporum, F. virgulforme), Magnaporthe (e.g., M. grisea, M. oryzae), Phytophthora (e.g., P. capsici, P. cinnamomi, P. infestans, P. parasitica, P. ramorum, P. sojae) and Zymoseptoria (e.g., Z. tritici). Proteins comprising, consisting essentially of or consisting of an amino acid sequence that is about/at least 60, 61, 62, 63, 64, 65, 66, 67, 68, 69, 70, 71, 72, 73, 74, 75, 76, 77, 78, 79, 80, 81, 82, 83, 84, 85, 86, 87, 88, 89, 90, 91, 92, 93, 94, 95, 96, 97, 98, 99 or 100% identical to one or more of the amino acid sequences set forth herein as SEQ ID NOs: 99 (and corresponding formulations, polynucleotides and organisms) may be especially useful for preventing, treating, suppressing, eliminating and/or reducing the severity of such infestations/infections.

[1358] Proteins exhibiting activity belonging to EC 1.14.99.56 (and corresponding formulations, polynucleotides and organisms) may be particularly useful for preventing, treating, suppressing, eliminating and/or reducing the severity of infestations/infections of a plant or plant part by Botrytis (e.g., B. cinerea), Fusarium (e.g., F. graminearum, F. oxysporum, F. virgulforme), Magnaporthe (e.g., M. grisea, M. oryzae), Phytophthora (e.g., P. capsici, P. cinnamomi, P. infestans, P. parasitica, P. ramorum, P. sojae) and Zymoseptoria (e.g., Z. tritici). Proteins comprising, consisting essentially of or consisting of an amino acid sequence that is about/at least 60, 61, 62, 63, 64, 65, 66, 67, 68, 69, 70, 71, 72, 73, 74, 75, 76, 77, 78, 79, 80, 81, 82, 83, 84, 85, 86, 87, 88, 89, 90, 91, 92, 93, 94, 95, 96, 97, 98, 99 or 100% identical to one or more of the amino acid sequences set forth herein as SEQ ID NOs: 99 (and corresponding formulations, polynucleotides and organisms) may be especially useful for preventing, treating, suppressing, eliminating and/or reducing the severity of such infestations/infections.

[1359] Proteins exhibiting activity belonging to EC 3.1 (and corresponding formulations, polynucleotides and organisms) may be particularly useful for preventing, treating, suppressing, eliminating and/or reducing the severity of infestations/infections of a plant or plant part by Botrytis (e.g., B. cinerea), Fusarium (e.g., F. graminearum, F. oxysporum, F. virgulforme), Phakopsora (e.g., P. pachyrhizi) and Zymoseptoria (e.g., Z. tritici). Proteins comprising, consisting essentially of or consisting of an amino acid sequence that is about/at least 60, 61, 62, 63, 64, 65, 66, 67, 68, 69, 70, 71, 72, 73, 74, 75, 76, 77, 78, 79, 80, 81, 82, 83, 84, 85, 86, 87, 88, 89, 90, 91, 92, 93, 94, 95, 96, 97, 98, 99 or 100% identical to one or more of the amino acid sequences set forth herein as SEQ ID NOs: 13 and 100-106 (and corresponding formulations, polynucleotides and organisms) may be especially useful for preventing, treating, suppressing, eliminating and/or reducing the severity of such infestations/infections.

[1360] Proteins exhibiting activity belonging to EC 3.1.1 (and corresponding formulations, polynucleotides and organisms) may be particularly useful for preventing, treating, suppressing, eliminating and/or reducing the severity of infestations/infections of a plant or plant part by Botrytis (e.g., B. cinerea), Fusarium (e.g., F. graminearum, F. oxysporum, F. virgulforme), Phakopsora (e.g., P. pachyrhizi) and Zymoseptoria (e.g., Z. tritici). Proteins comprising, consisting essentially of or consisting of an amino acid sequence that is about/at least 60, 61, 62, 63, 64, 65, 66, 67, 68, 69, 70, 71, 72, 73, 74, 75, 76, 77, 78, 79, 80, 81, 82, 83, 84, 85, 86, 87, 88, 89, 90, 91, 92, 93, 94, 95, 96, 97, 98, 99 or 100% identical to one or more of the amino acid sequences set forth herein as SEQ ID NOs: 13, 100-103 and 105 (and corresponding formulations, polynucleotides and organisms) may be especially useful for preventing, treating, suppressing, eliminating and/or reducing the severity of such infestations/infections.

[1361] Proteins exhibiting activity belonging to EC 3.1.1.3 (and corresponding formulations, polynucleotides and organisms) may be particularly useful for preventing, treating, suppressing, eliminating and/or reducing the severity of infestations/infections of a plant or plant part by Botrytis (e.g., B. cinerea), Fusarium (e.g., F. graminearum, F. oxysporum, F. virgulforme), Phakopsora (e.g., P. pachyrhizi) and Zymoseptoria (e.g., Z. tritici). Proteins comprising, consisting essentially of or consisting of an amino acid sequence that is about/at least 60, 61, 62, 63, 64, 65, 66, 67, 68, 69, 70, 71, 72, 73, 74, 75, 76, 77, 78, 79, 80, 81, 82, 83, 84, 85, 86, 87, 88, 89, 90, 91, 92, 93, 94, 95, 96, 97, 98, 99 or 100% identical to one or more of the amino acid sequences set forth herein as SEQ ID NOs: 100-103 (and corresponding formulations, polynucleotides and organisms) may be especially useful for preventing, treating, suppressing, eliminating and/or reducing the severity of such infestations/infections.

[1362] Proteins exhibiting activity belonging to EC 3.1.1.5 (and corresponding formulations, polynucleotides and organisms) may be particularly useful for preventing, treating, suppressing, eliminating and/or reducing the severity of infestations/infections of a plant or plant part by Botrytis (e.g., B. cinerea), Fusarium (e.g., F. graminearum, F. oxysporum, F. virgulforme), Phakopsora (e.g., P. pachyrhizi) and Zymoseptoria (e.g., Z. tritici). Proteins comprising, consisting essentially of or consisting of an amino acid sequence that is about/at least 60, 61, 62, 63, 64, 65, 66, 67, 68, 69, 70, 71, 72, 73, 74, 75, 76, 77, 78, 79, 80, 81, 82, 83, 84, 85, 86, 87, 88, 89, 90, 91, 92, 93, 94, 95, 96, 97, 98, 99 or 100% identical to one or more of the amino acid sequences set forth herein as SEQ ID NOs: 13 (and corresponding formulations, polynucleotides and organisms) may be especially useful for preventing, treating, suppressing, eliminating and/or reducing the severity of such infestations/infections.

[1363] Proteins exhibiting activity belonging to EC 3.1.1.11 (and corresponding formulations, polynucleotides and organisms) may be particularly useful for preventing, treating, suppressing, eliminating and/or reducing the severity of infestations/infections of a plant or plant part by Botrytis (e.g., B. cinerea), Fusarium (e.g., F. graminearum, F. oxysporum, F. virguliforme), Phakopsora (e.g., P. pachyrhizi) and Zymoseptoria (e.g., Z. tritici). Proteins comprising, consisting essentially of or consisting of an amino acid sequence that is about/at least 60, 61, 62, 63, 64, 65, 66, 67, 68, 69, 70, 71, 72, 73, 74, 75, 76, 77, 78, 79, 80, 81, 82, 83, 84, 85, 86, 87, 88, 89, 90, 91, 92, 93, 94, 95, 96, 97, 98, 99 or 100% identical to one or more of the amino acid sequences set forth herein as SEQ ID NOs: 105 (and corresponding formulations, polynucleotides and organisms) may be especially useful for preventing, treating, suppressing, eliminating and/or reducing the severity of such infestations/infections.

[1364] Proteins exhibiting activity belonging to EC 3.2 (and corresponding formulations, polynucleotides and organisms) may be particularly useful for preventing, treating, suppressing, eliminating and/or reducing the severity of infestations/infections of a plant or plant part by Blumeria (e.g., B. graminis), Botrytis (e.g., B. cinerea), Fusarium (e.g., F. graminearum, F. oxysporum, F. virgulforme), Magnaporthe (e.g., M. grisea, M. oryzae), Phakopsora (e.g., P. pachyrhizi), Phytophthora (e.g., P. capsici, P. cinnamomi, P. infestans, P. parasitica, P. ramorum, P. sojae), Pseudoperonospora (e.g., P. cubensis) and Zymoseptoria (e.g., Z. tritici). Proteins comprising, consisting essentially of or consisting of an amino acid sequence that is about/at least 60, 61, 62, 63, 64, 65, 66, 67, 68, 69, 70, 71, 72, 73, 74, 75, 76, 77, 78, 79, 80, 81, 82, 83, 84, 85, 86, 87, 88, 89, 90, 91, 92, 93, 94, 95, 96, 97, 98, 99 or 100% identical to one or more of the amino acid sequences set forth herein as SEQ ID NOs: 14-41 and 109-143 (and corresponding formulations, polynucleotides and organisms) may be especially useful for preventing, treating, suppressing, eliminating and/or reducing the severity of such infestations/infections.

[1365] Proteins exhibiting activity belonging to EC 3.2.1 (and corresponding formulations, polynucleotides and organisms) may be particularly useful for preventing, treating, suppressing, eliminating and/or reducing the severity of infestations/infections of a plant or plant part by Blumeria (e.g., B. graminis), Botrytis (e.g., B. cinerea), Fusarium (e.g., F. graminearum, F. oxysporum, F. virgulforme), Magnaporthe (e.g., M. grisea, M. oryzae), Phakopsora (e.g., P. pachyrhizi), Phytophthora (e.g., P. capsici, P. cinnamomi, P. infestans, P. parasitica, P. ramorum, P. sojae), Pseudoperonospora (e.g., P. cubensis) and Zymoseptoria (e.g., Z. tritici). Proteins comprising, consisting essentially of or consisting of an amino acid sequence that is about/at least 60, 61, 62, 63, 64, 65, 66, 67, 68, 69, 70, 71, 72, 73, 74, 75, 76, 77, 78, 79, 80, 81, 82, 83, 84, 85, 86, 87, 88, 89, 90, 91, 92, 93, 94, 95, 96, 97, 98, 99 or 100% identical to one or more of the amino acid sequences set forth herein as SEQ ID NOs: 14-41 and 109-143 (and corresponding formulations, polynucleotides and organisms) may be especially useful for preventing, treating, suppressing, eliminating and/or reducing the severity of such infestations/infections.

[1366] Proteins exhibiting activity belonging to EC 3.2.1.1 (and corresponding formulations, polynucleotides and organisms) may be particularly useful for preventing, treating, suppressing, eliminating and/or reducing the severity of infestations/infections of a plant or plant part by Botrytis (e.g., B. cinerea), Fusarium (e.g., F. graminearum, F. oxysporum, F. virgulforme), Phakopsora (e.g., P. pachyrhizi), Phytophthora (e.g., P. capsici, P. cinnamomi, P. infestans, P. parasitica, P. ramorum, P. sojae) and Zymoseptoria (e.g., Z. tritici). Proteins comprising, consisting essentially of or consisting of an amino acid sequence that is about/at least 60, 61, 62, 63, 64, 65, 66, 67, 68, 69, 70, 71, 72, 73, 74, 75, 76, 77, 78, 79, 80, 81, 82, 83, 84, 85, 86, 87, 88, 89, 90, 91, 92, 93, 94, 95, 96, 97, 98, 99 or 100% identical to one or more of the amino acid sequences set forth herein as SEQ ID NOs: 14-16 and 109-111 (and corresponding formulations, polynucleotides and organisms) may be especially useful for preventing, treating, suppressing, eliminating and/or reducing the severity of such infestations/infections.

[1367] Proteins exhibiting activity belonging to EC 3.2.1.3 (and corresponding formulations, polynucleotides and organisms) may be particularly useful for preventing, treating, suppressing, eliminating and/or reducing the severity of infestations/infections of a plant or plant part by Botrytis (e.g., B. cinerea), Fusarium (e.g., F. graminearum, F. oxysporum, F. virgulforme), Phakopsora (e.g., P. pachyrhizi) and Zymoseptoria (e.g., Z. tritici). Proteins comprising, consisting essentially of or consisting of an amino acid sequence that is about/at least 60, 61, 62, 63, 64, 65, 66, 67, 68, 69, 70, 71, 72, 73, 74, 75, 76, 77, 78, 79, 80, 81, 82, 83, 84, 85, 86, 87, 88, 89, 90, 91, 92, 93, 94, 95, 96, 97, 98, 99 or 100% identical to one or more of the amino acid sequences set forth herein as SEQ ID NOs: 17-18 (and corresponding formulations, polynucleotides and organisms) may be especially useful for preventing, treating, suppressing, eliminating and/or reducing the severity of such infestations/infections.

[1368] Proteins exhibiting activity belonging to EC 3.2.1.4 (and corresponding formulations, polynucleotides and organisms) may be particularly useful for preventing, treating, suppressing, eliminating and/or reducing the severity of infestations/infections of a plant or plant part by Botrytis (e.g., B. cinerea), Fusarium (e.g., F. graminearum, F. oxysporum, F. virgulforme) and Phakopsora (e.g., P. pachyrhizi). Proteins comprising, consisting essentially of or consisting of an amino acid sequence that is about/at least 60, 61, 62, 63, 64, 65, 66, 67, 68, 69, 70, 71, 72, 73, 74, 75, 76, 77, 78, 79, 80, 81, 82, 83, 84, 85, 86, 87, 88, 89, 90, 91, 92, 93, 94, 95, 96, 97, 98, 99 or 100% identical to one or more of the amino acid sequences set forth herein as SEQ ID NOs: 19 and 114-116 (and corresponding formulations, polynucleotides and organisms) may be especially useful for preventing, treating, suppressing, eliminating and/or reducing the severity of such infestations/infections.

[1369] Proteins exhibiting activity belonging to EC 3.2.1.6 (and corresponding formulations, polynucleotides and organisms) may be particularly useful for preventing, treating, suppressing, eliminating and/or reducing the severity of infestations/infections of a plant or plant part by Botrytis (e.g., B. cinerea), Fusarium (e.g., F. graminearum, F. oxysporum, F. virgulforme), Magnaporthe (e.g., M. grisea, M. oryzae), Phakopsora (e.g., P. pachyrhizi) and Zymoseptoria (e.g., Z. tritici). Proteins comprising, consisting essentially of or consisting of an amino acid sequence that is about/at least 60, 61, 62, 63, 64, 65, 66, 67, 68, 69, 70, 71, 72, 73, 74, 75, 76, 77, 78, 79, 80, 81, 82, 83, 84, 85, 86, 87, 88, 89, 90, 91, 92, 93, 94, 95, 96, 97, 98, 99 or 100% identical to one or more of the amino acid sequences set forth herein as SEQ ID NOs: 20 (and corresponding formulations, polynucleotides and organisms) may be especially useful for preventing, treating, suppressing, eliminating and/or reducing the severity of such infestations/infections.

[1370] Proteins exhibiting activity belonging to EC 3.2.1.7 (and corresponding formulations, polynucleotides and organisms) may be particularly useful for preventing, treating, suppressing, eliminating and/or reducing the severity of infestations/infections of a plant or plant part by Botrytis (e.g., B. cinerea) and Fusarium (e.g., F. graminearum, F. oxysporum, F. virgulforme). Proteins comprising, consisting essentially of or consisting of an amino acid sequence that is about/at least 60, 61, 62, 63, 64, 65, 66, 67, 68, 69, 70, 71, 72, 73, 74, 75, 76, 77, 78, 79, 80, 81, 82, 83, 84, 85, 86, 87, 88, 89, 90, 91, 92, 93, 94, 95, 96, 97, 98, 99 or 100% identical to one or more of the amino acid sequences set forth herein as SEQ ID NOs: 117 (and corresponding formulations, polynucleotides and organisms) may be especially useful for preventing, treating, suppressing, eliminating and/or reducing the severity of such infestations/infections.

[1371] Proteins exhibiting activity belonging to EC 3.2.1.8 (and corresponding formulations, polynucleotides and organisms) may be particularly useful for preventing, treating, suppressing, eliminating and/or reducing the severity of infestations/infections of a plant or plant part by Blumeria (e.g., B. graminis), Botrytis (e.g., B. cinerea), Fusarium (e.g., F. graminearum, F. oxysporum, F. virgulforme), Phakopsora (e.g., P. pachyrhizi), Phytophthora (e.g., P. capsici, P. cinnamomi, P. infestans, P. parasitica, P. ramorum, P. sojae), Pseudoperonospora (e.g., P. cubensis) and Zymoseptoria (e.g., Z. tritici). Proteins comprising, consisting essentially of or consisting of an amino acid sequence that is about/at least 60, 61, 62, 63, 64, 65, 66, 67, 68, 69, 70, 71, 72, 73, 74, 75, 76, 77, 78, 79, 80, 81, 82, 83, 84, 85, 86, 87, 88, 89, 90, 91, 92, 93, 94, 95, 96, 97, 98, 99 or 100% identical to one or more of the amino acid sequences set forth herein as SEQ ID NOs: 21-24 and 119 (and corresponding formulations, polynucleotides and organisms) may be especially useful for preventing, treating, suppressing, eliminating and/or reducing the severity of such infestations/infections.

[1372] Proteins exhibiting activity belonging to belonging to EC 3.2.1.11 (and corresponding formulations, polynucleotides and organisms) may be particularly useful for preventing, treating, suppressing, eliminating and/or reducing the severity of infestations/infections of a plant or plant part by Botrytis (e.g., B. cinerea), Fusarium (e.g., F. graminearum, F. oxysporum, F. virguliforme) and Zymoseptoria (e.g., Z. tritici). Proteins comprising, consisting essentially of or consisting of an amino acid sequence that is about/at least 60, 61, 62, 63, 64, 65, 66, 67, 68, 69, 70, 71, 72, 73, 74, 75, 76, 77, 78, 79, 80, 81, 82, 83, 84, 85, 86, 87, 88, 89, 90, 91, 92, 93, 94, 95, 96, 97, 98, 99 or 100% identical to one or more of the amino acid sequences set forth herein as SEQ ID NOs: 25 (and corresponding formulations, polynucleotides and organisms) may be especially useful for preventing, treating, suppressing, eliminating and/or reducing the severity of such infestations/infections.

[1373] Proteins exhibiting activity belonging to belonging to EC 3.2.1.15 (and corresponding formulations, polynucleotides and organisms) may be particularly useful for preventing, treating, suppressing, eliminating and/or reducing the severity of infestations/infections of a plant or plant part by Blumeria (e.g., B. graminis), Botrytis (e.g., B. cinerea), Fusarium (e.g., F. graminearum, F. oxysporum, F. virgulforme), Phakopsora (e.g., P. pachyrhizi) and Zymoseptoria (e.g., Z. tritici). Proteins comprising, consisting essentially of or consisting of an amino acid sequence that is about/at least 60, 61, 62, 63, 64, 65, 66, 67, 68, 69, 70, 71, 72, 73, 74, 75, 76, 77, 78, 79, 80, 81, 82, 83, 84, 85, 86, 87, 88, 89, 90, 91, 92, 93, 94, 95, 96, 97, 98, 99 or 100% identical to one or more of the amino acid sequences set forth herein as SEQ ID NOs: 125 (and corresponding formulations, polynucleotides and organisms) may be especially useful for preventing, treating, suppressing, eliminating and/or reducing the severity of such infestations/infections.

[1374] Proteins exhibiting activity belonging to belonging to EC 3.2.1.17 (and corresponding formulations, polynucleotides and organisms) may be particularly useful for preventing, treating, suppressing, eliminating and/or reducing the severity of infestations/infections of a plant or plant part by Botrytis (e.g., B. cinerea). Proteins comprising, consisting essentially of or consisting of an amino acid sequence that is about/at least 60, 61, 62, 63, 64, 65, 66, 67, 68, 69, 70, 71, 72, 73, 74, 75, 76, 77, 78, 79, 80, 81, 82, 83, 84, 85, 86, 87, 88, 89, 90, 91, 92, 93, 94, 95, 96, 97, 98, 99 or 100% identical to one or more of the amino acid sequences set forth herein as SEQ ID NOs: 26 (and corresponding formulations, polynucleotides and organisms) may be especially useful for preventing, treating, suppressing, eliminating and/or reducing the severity of such infestations/infections.

[1375] Proteins exhibiting activity belonging to belonging to EC 3.2.1.21 (and corresponding formulations, polynucleotides and organisms) may be particularly useful for preventing, treating, suppressing, eliminating and/or reducing the severity of infestations/infections of a plant or plant part by Magnaporthe (e.g., M. grisea, M. oryzae), Penicillium (e.g., P. digitatum, P. expansum, P. italicum, P. rugulosum, P. verrucosum), and Phytophthora (e.g., P. capsici, P. cinnamomi, P. infestans, P. parasitica, P. ramorum, P. sojae). Proteins comprising, consisting essentially of or consisting of an amino acid sequence that is about/at least 60, 61, 62, 63, 64, 65, 66, 67, 68, 69, 70, 71, 72, 73, 74, 75, 76, 77, 78, 79, 80, 81, 82, 83, 84, 85, 86, 87, 88, 89, 90, 91, 92, 93, 94, 95, 96, 97, 98, 99 or 100% identical to one or more of the amino acid sequences set forth herein as SEQ ID NOs: 126 (and corresponding formulations, polynucleotides and organisms) may be especially useful for preventing, treating, suppressing, eliminating and/or reducing the severity of such infestations/infections.

[1376] Proteins exhibiting activity belonging to belonging to EC 3.2.1.39 (and corresponding formulations, polynucleotides and organisms) may be particularly useful for preventing, treating, suppressing, eliminating and/or reducing the severity of infestations/infections of a plant or plant part by Botrytis (e.g., B. cinerea), Fusarium (e.g., F. graminearum, F. oxysporum, F. virguliforme) and Zymoseptoria (e.g., Z. tritici). Proteins comprising, consisting essentially of or consisting of an amino acid sequence that is about/at least 60, 61, 62, 63, 64, 65, 66, 67, 68, 69, 70, 71, 72, 73, 74, 75, 76, 77, 78, 79, 80, 81, 82, 83, 84, 85, 86, 87, 88, 89, 90, 91, 92, 93, 94, 95, 96, 97, 98, 99 or 100% identical to one or more of the amino acid sequences set forth herein as SEQ ID NOs: 27-28 (and corresponding formulations, polynucleotides and organisms) may be especially useful for preventing, treating, suppressing, eliminating and/or reducing the severity of such infestations/infections.

[1377] Proteins exhibiting activity belonging to belonging to EC 3.2.1.41 (and corresponding formulations, polynucleotides and organisms) may be particularly useful for preventing, treating, suppressing, eliminating and/or reducing the severity of infestations/infections of a plant or plant part by Botrytis (e.g., B. cinerea), Fusarium (e.g., F. graminearum, F. oxysporum, F. virguliforme), Phakopsora (e.g., P. pachyrhizi) and Zymoseptoria (e.g., Z. tritici). Proteins comprising, consisting essentially of or consisting of an amino acid sequence that is about/at least 60, 61, 62, 63, 64, 65, 66, 67, 68, 69, 70, 71, 72, 73, 74, 75, 76, 77, 78, 79, 80, 81, 82, 83, 84, 85, 86, 87, 88, 89, 90, 91, 92, 93, 94, 95, 96, 97, 98, 99 or 100% identical to one or more of the amino acid sequences set forth herein as SEQ ID NOs: 29 (and corresponding formulations, polynucleotides and organisms) may be especially useful for preventing, treating, suppressing, eliminating and/or reducing the severity of such infestations/infections.

[1378] Proteins exhibiting activity belonging to belonging to EC 3.2.1.55 (and corresponding formulations, polynucleotides and organisms) may be particularly useful for preventing, treating, suppressing, eliminating and/or reducing the severity of infestations/infections of a plant or plant part by Penicillium (e.g., P. digitatum, P. expansum, P. italicum, P. rugulosum, P. verrucosum). Proteins comprising, consisting essentially of or consisting of an amino acid sequence that is about/at least 60, 61, 62, 63, 64, 65, 66, 67, 68, 69, 70, 71, 72, 73, 74, 75, 76, 77, 78, 79, 80, 81, 82, 83, 84, 85, 86, 87, 88, 89, 90, 91, 92, 93, 94, 95, 96, 97, 98, 99 or 100% identical to one or more of the amino acid sequences set forth herein as SEQ ID NOs: 129 (and corresponding formulations, polynucleotides and organisms) may be especially useful for preventing, treating, suppressing, eliminating and/or reducing the severity of such infestations/infections.

[1379] Proteins exhibiting activity belonging to belonging to EC 3.2.1.58 (and corresponding formulations, polynucleotides and organisms) may be particularly useful for preventing, treating, suppressing, eliminating and/or reducing the severity of infestations/infections of a plant or plant part by Botrytis (e.g., B. cinerea), Fusarium (e.g., F. graminearum, F. oxysporum, F. virguliforme), Phakopsora (e.g., P. pachyrhizi) and Zymoseptoria (e.g., Z. tritici).

[1380] Proteins exhibiting activity belonging to belonging to EC 3.2.1.59 (and corresponding formulations, polynucleotides and organisms) may be particularly useful for preventing, treating, suppressing, eliminating and/or reducing the severity of infestations/infections of a plant or plant part by Zymoseptoria (e.g., Z. tritici). Proteins comprising, consisting essentially of or consisting of an amino acid sequence that is about/at least 60, 61, 62, 63, 64, 65, 66, 67, 68, 69, 70, 71, 72, 73, 74, 75, 76, 77, 78, 79, 80, 81, 82, 83, 84, 85, 86, 87, 88, 89, 90, 91, 92, 93, 94, 95, 96, 97, 98, 99 or 100% identical to one or more of the amino acid sequences set forth herein as SEQ ID NOs: 30 (and corresponding formulations, polynucleotides and organisms) may be especially useful for preventing, treating, suppressing, eliminating and/or reducing the severity of such infestations/infections.

[1381] Proteins exhibiting activity belonging to belonging to EC 3.2.1.73 (and corresponding formulations, polynucleotides and organisms) may be particularly useful for preventing, treating, suppressing, eliminating and/or reducing the severity of infestations/infections of a plant or plant part by Fusarium (e.g., F. graminearum, F. oxysporum, F. virguliforme). Proteins comprising, consisting essentially of or consisting of an amino acid sequence that is about/at least 60, 61, 62, 63, 64, 65, 66, 67, 68, 69, 70, 71, 72, 73, 74, 75, 76, 77, 78, 79, 80, 81, 82, 83, 84, 85, 86, 87, 88, 89, 90, 91, 92, 93, 94, 95, 96, 97, 98, 99 or 100% identical to one or more of the amino acid sequences set forth herein as SEQ ID NOs: 132 (and corresponding formulations, polynucleotides and organisms) may be especially useful for preventing, treating, suppressing, eliminating and/or reducing the severity of such infestations/infections.

[1382] Proteins exhibiting activity belonging to belonging to EC 3.2.1.75 (and corresponding formulations, polynucleotides and organisms) may be particularly useful for preventing, treating, suppressing, eliminating and/or reducing the severity of infestations/infections of a plant or plant part by Botrytis (e.g., B. cinerea), Fusarium (e.g., F. graminearum, F. oxysporum, F. virguliforme) and Zymoseptoria (e.g., Z. tritici). Proteins comprising, consisting essentially of or consisting of an amino acid sequence that is about/at least 60, 61, 62, 63, 64, 65, 66, 67, 68, 69, 70, 71, 72, 73, 74, 75, 76, 77, 78, 79, 80, 81, 82, 83, 84, 85, 86, 87, 88, 89, 90, 91, 92, 93, 94, 95, 96, 97, 98, 99 or 100% identical to one or more of the amino acid sequences set forth herein as SEQ ID NOs: 31-32 (and corresponding formulations, polynucleotides and organisms) may be especially useful for preventing, treating, suppressing, eliminating and/or reducing the severity of such infestations/infections.

[1383] Proteins exhibiting activity belonging to belonging to EC 3.2.1.78 (and corresponding formulations, polynucleotides and organisms) may be particularly useful for preventing, treating, suppressing, eliminating and/or reducing the severity of infestations/infections of a plant or plant part by Botrytis (e.g., B. cinerea), Fusarium (e.g., F. graminearum, F. oxysporum, F. virguliforme), Pseudoperonospora (e.g., P. cubensis) and Zymoseptoria (e.g., Z. tritici). Proteins comprising, consisting essentially of or consisting of an amino acid sequence that is about/at least 60, 61, 62, 63, 64, 65, 66, 67, 68, 69, 70, 71, 72, 73, 74, 75, 76, 77, 78, 79, 80, 81, 82, 83, 84, 85, 86, 87, 88, 89, 90, 91, 92, 93, 94, 95, 96, 97, 98, 99 or 100% identical to one or more of the amino acid sequences set forth herein as SEQ ID NOs: 33 (and corresponding formulations, polynucleotides and organisms) may be especially useful for preventing, treating, suppressing, eliminating and/or reducing the severity of such infestations/infections.

[1384] Proteins exhibiting activity belonging to belonging to EC 3.2.1.101 (and corresponding formulations, polynucleotides and organisms) may be particularly useful for preventing, treating, suppressing, eliminating and/or reducing the severity of infestations/infections of a plant or plant part by Fusarium (e.g., F. graminearum, F. oxysporum, F. virgulforme) and Zymoseptoria (e.g., Z. tritici). Proteins comprising, consisting essentially of or consisting of an amino acid sequence that is about/at least 60, 61, 62, 63, 64, 65, 66, 67, 68, 69, 70, 71, 72, 73, 74, 75, 76, 77, 78, 79, 80, 81, 82, 83, 84, 85, 86, 87, 88, 89, 90, 91, 92, 93, 94, 95, 96, 97, 98, 99 or 100% identical to one or more of the amino acid sequences set forth herein as SEQ ID NOs: 34 (and corresponding formulations, polynucleotides and organisms) may be especially useful for preventing, treating, suppressing, eliminating and/or reducing the severity of such infestations/infections.

[1385] Proteins exhibiting activity belonging to belonging to EC 3.2.1.109 (and corresponding formulations, polynucleotides and organisms) may be particularly useful for preventing, treating, suppressing, eliminating and/or reducing the severity of infestations/infections of a plant or plant part by Botrytis (e.g., B. cinerea), Fusarium (e.g., F. graminearum, F. oxysporum, F. virguliforme) and Zymoseptoria (e.g., Z. tritici). Proteins comprising, consisting essentially of or consisting of an amino acid sequence that is about/at least 60, 61, 62, 63, 64, 65, 66, 67, 68, 69, 70, 71, 72, 73, 74, 75, 76, 77, 78, 79, 80, 81, 82, 83, 84, 85, 86, 87, 88, 89, 90, 91, 92, 93, 94, 95, 96, 97, 98, 99 or 100% identical to one or more of the amino acid sequences set forth herein as SEQ ID NOs: 35-40 (and corresponding formulations, polynucleotides and organisms) may be especially useful for preventing, treating, suppressing, eliminating and/or reducing the severity of such infestations/infections.

[1386] Proteins exhibiting activity belonging to belonging to EC 3.2.1.133 (and corresponding formulations, polynucleotides and organisms) may be particularly useful for preventing, treating, suppressing, eliminating and/or reducing the severity of infestations/infections of a plant or plant part by Botrytis (e.g., B. cinerea), Fusarium (e.g., F. graminearum, F. oxysporum, F. virguliforme) and Zymoseptoria (e.g., Z. tritici). Proteins comprising, consisting essentially of or consisting of an amino acid sequence that is about/at least 60, 61, 62, 63, 64, 65, 66, 67, 68, 69, 70, 71, 72, 73, 74, 75, 76, 77, 78, 79, 80, 81, 82, 83, 84, 85, 86, 87, 88, 89, 90, 91, 92, 93, 94, 95, 96, 97, 98, 99 or 100% identical to one or more of the amino acid sequences set forth herein as SEQ ID NOs: 41 (and corresponding formulations, polynucleotides and organisms) may be especially useful for preventing, treating, suppressing, eliminating and/or reducing the severity of such infestations/infections.

[1387] Proteins exhibiting activity belonging to belonging to EC 3.4 (and corresponding formulations, polynucleotides and organisms) may be particularly useful for preventing, treating, suppressing, eliminating and/or reducing the severity of infestations/infections of a plant or plant part by Blumeria (e.g., B. graminis), Botrytis (e.g., B. cinerea), Fusarium (e.g., F. graminearum, F. oxysporum, F. virgulforme), Magnaporthe (e.g., M. grisea, M. oryzae), Phakopsora (e.g., P. pachyrhizi), Phytophthora (e.g., P. capsici, P. cinnamomi, P. infestans, P. parasitica, P. ramorum, P. sojae), Pseudoperonospora (e.g., P. cubensis) and Zymoseptoria (e.g., Z. tritici). Proteins comprising, consisting essentially of or consisting of an amino acid sequence that is about/at least 60, 61, 62, 63, 64, 65, 66, 67, 68, 69, 70, 71, 72, 73, 74, 75, 76, 77, 78, 79, 80, 81, 82, 83, 84, 85, 86, 87, 88, 89, 90, 91, 92, 93, 94, 95, 96, 97, 98, 99 or 100% identical to one or more of the amino acid sequences set forth herein as SEQ ID NOs: 42-48 (and corresponding formulations, polynucleotides and organisms) may be especially useful for preventing, treating, suppressing, eliminating and/or reducing the severity of such infestations/infections.

[1388] Proteins exhibiting activity belonging to belonging to EC 3.4.11 (and corresponding formulations, polynucleotides and organisms) may be particularly useful for preventing, treating, suppressing, eliminating and/or reducing the severity of infestations/infections of a plant or plant part by Botrytis (e.g., B. cinerea), Fusarium (e.g., F. graminearum, F. oxysporum, F. virguliforme), Phakopsora (e.g., P. pachyrhizi) and Zymoseptoria (e.g., Z. tritici).

[1389] Proteins exhibiting activity belonging to belonging to EC 3.4.11.1 (and corresponding formulations, polynucleotides and organisms) may be particularly useful for preventing, treating, suppressing, eliminating and/or reducing the severity of infestations/infections of a plant or plant part by Botrytis (e.g., B. cinerea), Fusarium (e.g., F. graminearum, F. oxysporum, F. virgulforme), Phakopsora (e.g., P. pachyrhizi) and Zymoseptoria (e.g., Z. tritici).

[1390] Proteins exhibiting activity belonging to belonging to EC 3.4.21 (and corresponding formulations, polynucleotides and organisms) may be particularly useful for preventing, treating, suppressing, eliminating and/or reducing the severity of infestations/infections of a plant or plant part by Blumeria (e.g., B. graminis), Botrytis (e.g., B. cinerea), Fusarium (e.g., F. graminearum, F. oxysporum, F. virguliforme), Magnaporthe (e.g., M. grisea, M. oryzae), Phakopsora (e.g., P. pachyrhizi), Phytophthora (e.g., P. capsici, P. cinnamomi, P. infestans, P. parasitica, P. ramorum, P. sojae), Pseudoperonospora (e.g., P. cubensis) and Zymoseptoria (e.g., Z. tritici). Proteins comprising, consisting essentially of or consisting of an amino acid sequence that is about/at least 60, 61, 62, 63, 64, 65, 66, 67, 68, 69, 70, 71, 72, 73, 74, 75, 76, 77, 78, 79, 80, 81, 82, 83, 84, 85, 86, 87, 88, 89, 90, 91, 92, 93, 94, 95, 96, 97, 98, 99 or 100% identical to one or more of the amino acid sequences set forth herein as SEQ ID NOs: 42-47 (and corresponding formulations, polynucleotides and organisms) may be especially useful for preventing, treating, suppressing, eliminating and/or reducing the severity of such infestations/infections.

[1391] Proteins exhibiting activity belonging to belonging to EC 3.4.21.19 (and corresponding formulations, polynucleotides and organisms) may be particularly useful for preventing, treating, suppressing, eliminating and/or reducing the severity of infestations/infections of a plant or plant part by Fusarium (e.g., F. graminearum, F. oxysporum, F. virgulforme), Phakopsora (e.g., P. pachyrhizi), Phytophthora (e.g., P. capsici, P. cinnamomi, P. infestans, P. parasitica, P. ramorum, P. sojae) and Pseudoperonospora (e.g., P. cubensis). Proteins comprising, consisting essentially of or consisting of an amino acid sequence that is about/at least 60, 61, 62, 63, 64, 65, 66, 67, 68, 69, 70, 71, 72, 73, 74, 75, 76, 77, 78, 79, 80, 81, 82, 83, 84, 85, 86, 87, 88, 89, 90, 91, 92, 93, 94, 95, 96, 97, 98, 99 or 100% identical to one or more of the amino acid sequences set forth herein as SEQ ID NOs: 43 (and corresponding formulations, polynucleotides and organisms) may be especially useful for preventing, treating, suppressing, eliminating and/or reducing the severity of such infestations/infections.

[1392] Proteins exhibiting activity belonging to belonging to EC 3.4.21.62 (and corresponding formulations, polynucleotides and organisms) may be particularly useful for preventing, treating, suppressing, eliminating and/or reducing the severity of infestations/infections of a plant or plant part by Botrytis (e.g., B. cinerea), Fusarium (e.g., F. graminearum, F. oxysporum, F. virguliforme), Phakopsora (e.g., P. pachyrhizi), Phytophthora (e.g., P. capsici, P. cinnamomi, P. infestans, P. parasitica, P. ramorum, P. sojae), Pseudoperonospora (e.g., P. cubensis) and Zymoseptoria (e.g., Z. tritici). Proteins comprising, consisting essentially of or consisting of an amino acid sequence that is about/at least 60, 61, 62, 63, 64, 65, 66, 67, 68, 69, 70, 71, 72, 73, 74, 75, 76, 77, 78, 79, 80, 81, 82, 83, 84, 85, 86, 87, 88, 89, 90, 91, 92, 93, 94, 95, 96, 97, 98, 99 or 100% identical to one or more of the amino acid sequences set forth herein as SEQ ID NOs: 44-47 (and corresponding formulations, polynucleotides and organisms) may be especially useful for preventing, treating, suppressing, eliminating and/or reducing the severity of such infestations/infections.

[1393] Proteins exhibiting activity belonging to belonging to EC 3.4.24 (and corresponding formulations, polynucleotides and organisms) may be particularly useful for preventing, treating, suppressing, eliminating and/or reducing the severity of infestations/infections of a plant or plant part by Botrytis (e.g., B. cinerea), Fusarium (e.g., F. graminearum, F. oxysporum, F. virguliforme), Phakopsora (e.g., P. pachyrhizi), Phytophthora (e.g., P. capsici, P. cinnamomi, P. infestans, P. parasitica, P. ramorum, P. sojae) and Zymoseptoria (e.g., Z. tritici). Proteins comprising, consisting essentially of or consisting of an amino acid sequence that is about/at least 60, 61, 62, 63, 64, 65, 66, 67, 68, 69, 70, 71, 72, 73, 74, 75, 76, 77, 78, 79, 80, 81, 82, 83, 84, 85, 86, 87, 88, 89, 90, 91, 92, 93, 94, 95, 96, 97, 98, 99 or 100% identical to one or more of the amino acid sequences set forth herein as SEQ ID NOs: 48 (and corresponding formulations, polynucleotides and organisms) may be especially useful for preventing, treating, suppressing, eliminating and/or reducing the severity of such infestations/infections.

[1394] Proteins exhibiting activity belonging to belonging to EC 3.4.24.28 (and corresponding formulations, polynucleotides and organisms) may be particularly useful for preventing, treating, suppressing, eliminating and/or reducing the severity of infestations/infections of a plant or plant part by Botrytis (e.g., B. cinerea), Fusarium (e.g., F. graminearum, F. oxysporum, F. virgulforme), Phakopsora (e.g., P. pachyrhizi), Phytophthora (e.g., P. capsici, P. cinnamomi, P. infestans, P. parasitica, P. ramorum, P. sojae) and Zymoseptoria (e.g., Z. tritici). Proteins comprising, consisting essentially of or consisting of an amino acid sequence that is about/at least 60, 61, 62, 63, 64, 65, 66, 67, 68, 69, 70, 71, 72, 73, 74, 75, 76, 77, 78, 79, 80, 81, 82, 83, 84, 85, 86, 87, 88, 89, 90, 91, 92, 93, 94, 95, 96, 97, 98, 99 or 100% identical to one or more of the amino acid sequences set forth herein as SEQ ID NOs: 48 (and corresponding formulations, polynucleotides and organisms) may be especially useful for preventing, treating, suppressing, eliminating and/or reducing the severity of such infestations/infections.

[1395] Proteins exhibiting activity belonging to belonging to EC 4.2 (and corresponding formulations, polynucleotides and organisms) may be particularly useful for preventing, treating, suppressing, eliminating and/or reducing the severity of infestations/infections of a plant or plant part by Botrytis (e.g., B. cinerea), Fusarium (e.g., F. graminearum, F. oxysporum, F. virguliforme), Penicillium (e.g., P. digitatum, P. expansum, P. italicum, P. rugulosum, P. verrucosum), and Zymoseptoria (e.g., Z. tritici). Proteins comprising, consisting essentially of or consisting of an amino acid sequence that is about/at least 60, 61, 62, 63, 64, 65, 66, 67, 68, 69, 70, 71, 72, 73, 74, 75, 76, 77, 78, 79, 80, 81, 82, 83, 84, 85, 86, 87, 88, 89, 90, 91, 92, 93, 94, 95, 96, 97, 98, 99 or 100% identical to one or more of the amino acid sequences set forth herein as SEQ ID NOs: 149 (and corresponding formulations, polynucleotides and organisms) may be especially useful for preventing, treating, suppressing, eliminating and/or reducing the severity of such infestations/infections.

[1396] Proteins exhibiting activity belonging to belonging to EC 4.2.2 (and corresponding formulations, polynucleotides and organisms) may be particularly useful for preventing, treating, suppressing, eliminating and/or reducing the severity of infestations/infections of a plant or plant part by Botrytis (e.g., B. cinerea), Fusarium (e.g., F. graminearum, F. oxysporum, F. virguliforme), Penicillium (e.g., P. digitatum, P. expansum, P. italicum, P. rugulosum, P. verrucosum), and Zymoseptoria (e.g., Z. tritici). Proteins comprising, consisting essentially of or consisting of an amino acid sequence that is about/at least 60, 61, 62, 63, 64, 65, 66, 67, 68, 69, 70, 71, 72, 73, 74, 75, 76, 77, 78, 79, 80, 81, 82, 83, 84, 85, 86, 87, 88, 89, 90, 91, 92, 93, 94, 95, 96, 97, 98, 99 or 100% identical to one or more of the amino acid sequences set forth herein as SEQ ID NOs: 149 (and corresponding formulations, polynucleotides and organisms) may be especially useful for preventing, treating, suppressing, eliminating and/or reducing the severity of such infestations/infections.

[1397] Proteins exhibiting activity belonging to belonging to EC 4.2.2.2 (and corresponding formulations, polynucleotides and organisms) may be particularly useful for preventing, treating, suppressing, eliminating and/or reducing the severity of infestations/infections of a plant or plant part by Botrytis (e.g., B. cinerea), Fusarium (e.g., F. graminearum, F. oxysporum, F. virguliforme), Penicillium (e.g., P. digitatum, P. expansum, P. italicum, P. rugulosum, P. verrucosum), and Zymoseptoria (e.g., Z. tritici). Proteins comprising, consisting essentially of or consisting of an amino acid sequence that is about/at least 60, 61, 62, 63, 64, 65, 66, 67, 68, 69, 70, 71, 72, 73, 74, 75, 76, 77, 78, 79, 80, 81, 82, 83, 84, 85, 86, 87, 88, 89, 90, 91, 92, 93, 94, 95, 96, 97, 98, 99 or 100% identical to one or more of the amino acid sequences set forth herein as SEQ ID NOs: 149 (and corresponding formulations, polynucleotides and organisms) may be especially useful for preventing, treating, suppressing, eliminating and/or reducing the severity of such infestations/infections.

[1398] It is to be understood that compositions of the present disclosure needn't be toxic to be effective. As noted above, proteins of the present disclosure may exert their effects through various non-lethal means, such as reducing the attraction of a pest to a treated surface, inhibiting feeding, etc. Moreover, proteins and compositions of the present disclosure—even those capable of exerting a toxic effect—may be used in non-lethal doses to enhance the efficacy of and/or expand the target pest range of various chemical pesticides and biological pesticides.

[1399] The present disclosure extends to methods of using compositions of the present disclosure (e.g., proteins, formulations, polynucleotides and organisms of the present disclosure) for preventing, treating, suppressing, eliminating and/or reducing the severity of infestations/infections of/by horticultural pests, such as phytopathogenic acarids, bacteria, fungi, gastropod, insects, nematodes, oomycetes protozoa and weeds.

[1400] In some embodiments, a protein exhibiting activity belonging to EC 1.1 (or a corresponding formulation, polynucleotide, or organism) is used to prevent, treat, suppress, eliminate and/or reduce the severity of an infestation/infection of a plant or plant part of/by one or more Blumeria (e.g., B. graminis), Botrytis (e.g., B. cinerea), Fusarium (e.g., F. graminearum, F. oxysporum, F. virguliforme), Magnaporthe (e.g., M. grisea, M. oryzae), Phakopsora (e.g., P. pachyrhizi), Phytophthora (e.g., P. capsici, P. cinnamomi, P. infestans, P. parasitica, P. ramorum, P. sojae) and Zymoseptoria (e.g., Z. tritici). For example, an oxidoreductase, optionally a protein comprising, consisting essentially of or consisting of an amino acid sequence that is about/at least 60, 61, 62, 63, 64, 65, 66, 67, 68, 69, 70, 71, 72, 73, 74, 75, 76, 77, 78, 79, 80, 81, 82, 83, 84, 85, 86, 87, 88, 89, 90, 91, 92, 93, 94, 95, 96, 97, 98, 99 or 100% identical to one or more of the amino acid sequences set forth herein as SEQ ID NOs: 1-8, (or a corresponding formulation, polynucleotide, or organism) may be applied to a plant or plant part to prevent, treat, suppress, eliminate and/or reducing the severity of such infestations/infections.

[1401] In some embodiments, a protein exhibiting activity belonging to EC 1.1.3 (or a corresponding formulation, polynucleotide, or organism) is used to prevent, treat, suppress, eliminate and/or reduce the severity of an infestation/infection of a plant or plant part of/by one or more Blumeria (e.g., B. graminis), Botrytis (e.g., B. cinerea), Fusarium (e.g., F. graminearum, F. oxysporum, F. virguliforme), Magnaporthe (e.g., M. grisea, M. oryzae), Phakopsora (e.g., P. pachyrhizi), Phytophthora (e.g., P. capsici, P. cinnamomi, P. infestans, P. parasitica, P. ramorum, P. sojae) and Zymoseptoria (e.g., Z. tritici). For example, a oxidoreductase (with oxygen as an acceptor), optionally a protein comprising, consisting essentially of or consisting of an amino acid sequence that is about/at least 60, 61, 62, 63, 64, 65, 66, 67, 68, 69, 70, 71, 72, 73, 74, 75, 76, 77, 78, 79, 80, 81, 82, 83, 84, 85, 86, 87, 88, 89, 90, 91, 92, 93, 94, 95, 96, 97, 98, 99 or 100% identical to one or more of the amino acid sequences set forth herein as SEQ ID NOs: 1-8 (or a corresponding formulation, polynucleotide, or organism) may be applied to a plant or plant part to prevent, treat, suppress, eliminate and/or reducing the severity of such infestations/infections.

[1402] In some embodiments, a protein exhibiting belonging to EC 1.1.3.4 (or a corresponding formulation, polynucleotide, or organism) is used to prevent, treat, suppress, eliminate and/or reduce the severity of an infestation/infection of a plant or plant part of/by one or more Blumeria (e.g., B. graminis), Botrytis (e.g., B. cinerea), Fusarium (e.g., F. graminearum, F. oxysporum, F. virguliforme), Magnaporthe (e.g., M. grisea, M. oryzae), Phakopsora (e.g., P. pachyrhizi), Phytophthora (e.g., P. capsici, P. cinnamomi, P. infestans, P. parasitica, P. ramorum, P. sojae) and Zymoseptoria (e.g., Z. tritici). For example, a glucose oxidase, optionally a protein comprising, consisting essentially of or consisting of an amino acid sequence that is about/at least 60, 61, 62, 63, 64, 65, 66, 67, 68, 69, 70, 71, 72, 73, 74, 75, 76, 77, 78, 79, 80, 81, 82, 83, 84, 85, 86, 87, 88, 89, 90, 91, 92, 93, 94, 95, 96, 97, 98, 99 or 100% identical to one or more of the amino acid sequences set forth herein as SEQ ID NOs: 1-5, (or a corresponding formulation, polynucleotide, or organism) may be applied to a plant or plant part to prevent, treat, suppress, eliminate and/or reducing the severity of such infestations/infections.

[1403] In some embodiments, a protein exhibiting activity belonging to EC 1.1.3.25 (now included in EC 1.1.99.18) (or a corresponding formulation, polynucleotide, or organism) is used to prevent, treat, suppress, eliminate and/or reduce the severity of an infestation/infection of a plant or plant part of/by one or more Botrytis (e.g., B. cinerea), Fusarium (e.g., F. graminearum, F. oxysporum, F. virgulforme), Magnaporthe (e.g., M. grisea, M. oryzae), Phytophthora (e.g., P. capsici, P. cinnamomi, P. infestans, P. parasitica, P. ramorum, P. sojae) and Zymoseptoria (e.g., Z. tritici). For example, a cellobiose dehydrogenase, optionally a protein comprising, consisting essentially of or consisting of an amino acid sequence that is about/at least 60, 61, 62, 63, 64, 65, 66, 67, 68, 69, 70, 71, 72, 73, 74, 75, 76, 77, 78, 79, 80, 81, 82, 83, 84, 85, 86, 87, 88, 89, 90, 91, 92, 93, 94, 95, 96, 97, 98, 99 or 100% identical to one or more of the amino acid sequences set forth herein as SEQ ID NOs: 6-8, (or a corresponding formulation, polynucleotide, or organism) may be applied to a plant or plant part to prevent, treat, suppress, eliminate and/or reducing the severity of such infestations/infections.

[1404] In some embodiments, a protein exhibiting activity belonging to belonging to EC 1.10 (or a corresponding formulation, polynucleotide, or organism) is used to prevent, treat, suppress, eliminate and/or reduce the severity of an infestation/infection of a plant or plant part of/by one or more Botrytis (e.g., B. cinerea), Fusarium (e.g., F. graminearum, F. oxysporum, F. virguliforme), Phakopsora (e.g., P. pachyrhizi) and Zymoseptoria (e.g., Z. tritici). For example, a oxidase, optionally a protein comprising, consisting essentially of or consisting of an amino acid sequence that is about/at least 60, 61, 62, 63, 64, 65, 66, 67, 68, 69, 70, 71, 72, 73, 74, 75, 76, 77, 78, 79, 80, 81, 82, 83, 84, 85, 86, 87, 88, 89, 90, 91, 92, 93, 94, 95, 96, 97, 98, 99 or 100% identical to one or more of the amino acid sequences set forth herein as SEQ ID NOs: 9, (or a corresponding formulation, polynucleotide, or organism) may be applied to a plant or plant part to prevent, treat, suppress, eliminate and/or reducing the severity of such infestations/infections.

[1405] In some embodiments, a protein exhibiting activity belonging to belonging to EC 1.10.3 (or a corresponding formulation, polynucleotide, or organism) is used to prevent, treat, suppress, eliminate and/or reduce the severity of an infestation/infection of a plant or plant part of/by one or more Botrytis (e.g., B. cinerea), Fusarium (e.g., F. graminearum, F. oxysporum, F. virguliforme), Phakopsora (e.g., P. pachyrhizi) and Zymoseptoria (e.g., Z. tritici). For example, a oxidase, optionally a protein comprising, consisting essentially of or consisting of an amino acid sequence that is about/at least 60, 61, 62, 63, 64, 65, 66, 67, 68, 69, 70, 71, 72, 73, 74, 75, 76, 77, 78, 79, 80, 81, 82, 83, 84, 85, 86, 87, 88, 89, 90, 91, 92, 93, 94, 95, 96, 97, 98, 99 or 100% identical to one or more of the amino acid sequences set forth herein as SEQ ID NOs: 9, (or a corresponding formulation, polynucleotide, or organism) may be applied to a plant or plant part to prevent, treat, suppress, eliminate and/or reducing the severity of such infestations/infections.

[1406] In some embodiments, a protein exhibiting activity belonging to belonging to EC 1.10.3.2 (or a corresponding formulation, polynucleotide, or organism) is used to prevent, treat, suppress, eliminate and/or reduce the severity of an infestation/infection of a plant or plant part of/by one or more Botrytis (e.g., B. cinerea), Fusarium (e.g., F. graminearum, F. oxysporum, F. virguliforme), Phakopsora (e.g., P. pachyrhizi) and Zymoseptoria (e.g., Z. tritici). For example, a laccase, optionally a protein comprising, consisting essentially of or consisting of an amino acid sequence that is about/at least 60, 61, 62, 63, 64, 65, 66, 67, 68, 69, 70, 71, 72, 73, 74, 75, 76, 77, 78, 79, 80, 81, 82, 83, 84, 85, 86, 87, 88, 89, 90, 91, 92, 93, 94, 95, 96, 97, 98, 99 or 100% identical to one or more of the amino acid sequences set forth herein as SEQ ID NOs: 9, (or a corresponding formulation, polynucleotide, or organism) may be applied to a plant or plant part to prevent, treat, suppress, eliminate and/or reducing the severity of such infestations/infections.

[1407] In some embodiments, a protein exhibiting activity belonging to EC 1.11 (or a corresponding formulation, polynucleotide, or organism) is used to prevent, treat, suppress, eliminate and/or reduce the severity of an infestation/infection of a plant or plant part of/by one or more Botrytis (e.g., B. cinerea), Fusarium (e.g., F. graminearum, F. oxysporum, F. virguliforme), Magnaporthe (e.g., M. grisea, M. oryzae), Phytophthora (e.g., P. capsici, P. cinnamomi, P. infestans, P. parasitica, P. ramorum, P. sojae) and Zymoseptoria (e.g., Z. tritici). For example, a peroxidase, optionally a protein comprising, consisting essentially of or consisting of an amino acid sequence that is about/at least 60, 61, 62, 63, 64, 65, 66, 67, 68, 69, 70, 71, 72, 73, 74, 75, 76, 77, 78, 79, 80, 81, 82, 83, 84, 85, 86, 87, 88, 89, 90, 91, 92, 93, 94, 95, 96, 97, 98, 99 or 100% identical to one or more of the amino acid sequences set forth herein as SEQ ID NOs: 10-12, (or a corresponding formulation, polynucleotide, or organism) may be applied to a plant or plant part to prevent, treat, suppress, eliminate and/or reducing the severity of such infestations/infections.

[1408] In some embodiments, a protein exhibiting activity belonging to EC 1.11.1 (or a corresponding formulation, polynucleotide, or organism) is used to prevent, treat, suppress, eliminate and/or reduce the severity of an infestation/infection of a plant or plant part of/by one or more Botrytis (e.g., B. cinerea), Fusarium (e.g., F. graminearum, F. oxysporum, F. virguliforme), Magnaporthe (e.g., M. grisea, M. oryzae), Phytophthora (e.g., P. capsici, P. cinnamomi, P. infestans, P. parasitica, P. ramorum, P. sojae) and Zymoseptoria (e.g., Z. tritici). For example, a peroxidase, optionally a protein comprising, consisting essentially of or consisting of an amino acid sequence that is about/at least 60, 61, 62, 63, 64, 65, 66, 67, 68, 69, 70, 71, 72, 73, 74, 75, 76, 77, 78, 79, 80, 81, 82, 83, 84, 85, 86, 87, 88, 89, 90, 91, 92, 93, 94, 95, 96, 97, 98, 99 or 100% identical to one or more of the amino acid sequences set forth herein as SEQ ID NOs: 10-12, (or a corresponding formulation, polynucleotide, or organism) may be applied to a plant or plant part to prevent, treat, suppress, eliminate and/or reducing the severity of such infestations/infections.

[1409] In some embodiments, a protein exhibiting activity belonging to EC 1.11.1.6 (or a corresponding formulation, polynucleotide, or organism) is used to prevent, treat, suppress, eliminate and/or reduce the severity of an infestation/infection of a plant or plant part of/by one or more Botrytis (e.g., B. cinerea), Fusarium (e.g., F. graminearum, F. oxysporum, F. virguliforme), Magnaporthe (e.g., M. grisea, M. oryzae), Phytophthora (e.g., P. capsici, P. cinnamomi, P. infestans, P. parasitica, P. ramorum, P. sojae) and Zymoseptoria (e.g., Z. tritici). For example, a catalase, optionally a protein comprising, consisting essentially of or consisting of an amino acid sequence that is about/at least 60, 61, 62, 63, 64, 65, 66, 67, 68, 69, 70, 71, 72, 73, 74, 75, 76, 77, 78, 79, 80, 81, 82, 83, 84, 85, 86, 87, 88, 89, 90, 91, 92, 93, 94, 95, 96, 97, 98, 99 or 100% identical to one or more of the amino acid sequences set forth herein as SEQ ID NOs: 10-11, (or a corresponding formulation, polynucleotide, or organism) may be applied to a plant or plant part to prevent, treat, suppress, eliminate and/or reducing the severity of such infestations/infections.

[1410] In some embodiments, a protein exhibiting activity belonging to EC 1.11.1.7 (or a corresponding formulation, polynucleotide, or organism) is used to prevent, treat, suppress, eliminate and/or reduce the severity of an infestation/infection of a plant or plant part of/by one or more Botrytis (e.g., B. cinerea). For example, a peroxidase, optionally a protein comprising, consisting essentially of or consisting of an amino acid sequence that is about/at least 60, 61, 62, 63, 64, 65, 66, 67, 68, 69, 70, 71, 72, 73, 74, 75, 76, 77, 78, 79, 80, 81, 82, 83, 84, 85, 86, 87, 88, 89, 90, 91, 92, 93, 94, 95, 96, 97, 98, 99 or 100% identical to one or more of the amino acid sequences set forth herein as SEQ ID NOs: 12, (or a corresponding formulation, polynucleotide, or organism) may be applied to a plant or plant part to prevent, treat, suppress, eliminate and/or reducing the severity of such infestations/infections.

[1411] In some embodiments, a protein exhibiting activity belonging to EC 1.14 (or a corresponding formulation, polynucleotide, or organism) is used to prevent, treat, suppress, eliminate and/or reduce the severity of an infestation/infection of a plant or plant part of/by one or more Botrytis (e.g., B. cinerea), Fusarium (e.g., F. graminearum, F. oxysporum, F. virguliforme), Magnaporthe (e.g., M. grisea, M. oryzae), Phytophthora (e.g., P. capsici, P. cinnamomi, P. infestans, P. parasitica, P. ramorum, P. sojae) and Zymoseptoria (e.g., Z. tritici). For example, a oxygenase, optionally a protein comprising, consisting essentially of or consisting of an amino acid sequence that is about/at least 60, 61, 62, 63, 64, 65, 66, 67, 68, 69, 70, 71, 72, 73, 74, 75, 76, 77, 78, 79, 80, 81, 82, 83, 84, 85, 86, 87, 88, 89, 90, 91, 92, 93, 94, 95, 96, 97, 98, 99 or 100% identical to one or more of the amino acid sequences set forth herein as SEQ ID NOs: 99, (or a corresponding formulation, polynucleotide, or organism) may be applied to a plant or plant part to prevent, treat, suppress, eliminate and/or reducing the severity of such infestations/infections.

[1412] In some embodiments, a protein exhibiting activity belonging to EC 1.14.99 (or a corresponding formulation, polynucleotide, or organism) is used to prevent, treat, suppress, eliminate and/or reduce the severity of an infestation/infection of a plant or plant part of/by one or more Botrytis (e.g., B. cinerea), Fusarium (e.g., F. graminearum, F. oxysporum, F. virguliforme), Magnaporthe (e.g., M. grisea, M. oryzae), Phytophthora (e.g., P. capsici, P. cinnamomi, P. infestans, P. parasitica, P. ramorum, P. sojae) and Zymoseptoria (e.g., Z. tritici). For example, a monooxygenase, optionally a protein comprising, consisting essentially of or consisting of an amino acid sequence that is about/at least 60, 61, 62, 63, 64, 65, 66, 67, 68, 69, 70, 71, 72, 73, 74, 75, 76, 77, 78, 79, 80, 81, 82, 83, 84, 85, 86, 87, 88, 89, 90, 91, 92, 93, 94, 95, 96, 97, 98, 99 or 100% identical to one or more of the amino acid sequences set forth herein as SEQ ID NOs: 99, (or a corresponding formulation, polynucleotide, or organism) may be applied to a plant or plant part to prevent, treat, suppress, eliminate and/or reducing the severity of such infestations/infections.

[1413] In some embodiments, a protein exhibiting activity belonging to EC 1.14.99.56 (or a corresponding formulation, polynucleotide, or organism) is used to prevent, treat, suppress, eliminate and/or reduce the severity of an infestation/infection of a plant or plant part of/by one or more Botrytis (e.g., B. cinerea), Fusarium (e.g., F. graminearum, F. oxysporum, F. virguliforme), Magnaporthe (e.g., M. grisea, M. oryzae), Phytophthora (e.g., P. capsici, P. cinnamomi, P. infestans, P. parasitica, P. ramorum, P. sojae) and Zymoseptoria (e.g., Z. tritici). For example, a lytic cellulose monooxygenase, optionally a protein comprising, consisting essentially of or consisting of an amino acid sequence that is about/at least 60, 61, 62, 63, 64, 65, 66, 67, 68, 69, 70, 71, 72, 73, 74, 75, 76, 77, 78, 79, 80, 81, 82, 83, 84, 85, 86, 87, 88, 89, 90, 91, 92, 93, 94, 95, 96, 97, 98, 99 or 100% identical to one or more of the amino acid sequences set forth herein as SEQ ID NOs: 99, (or a corresponding formulation, polynucleotide, or organism) may be applied to a plant or plant part to prevent, treat, suppress, eliminate and/or reducing the severity of such infestations/infections.

[1414] In some embodiments, a protein exhibiting activity belonging to EC 3.1 (or a corresponding formulation, polynucleotide, or organism) is used to prevent, treat, suppress, eliminate and/or reduce the severity of an infestation/infection of a plant or plant part of/by one or more Botrytis (e.g., B. cinerea), Fusarium (e.g., F. graminearum, F. oxysporum, F. virguliforme), Phakopsora (e.g., P. pachyrhizi) and Zymoseptoria (e.g., Z. tritici). For example, a hydrolase, optionally a protein comprising, consisting essentially of or consisting of an amino acid sequence that is about/at least 60, 61, 62, 63, 64, 65, 66, 67, 68, 69, 70, 71, 72, 73, 74, 75, 76, 77, 78, 79, 80, 81, 82, 83, 84, 85, 86, 87, 88, 89, 90, 91, 92, 93, 94, 95, 96, 97, 98, 99 or 100% identical to one or more of the amino acid sequences set forth herein as SEQ ID NOs: 13, and 100-106 (or a corresponding formulation, polynucleotide, or organism) may be applied to a plant or plant part to prevent, treat, suppress, eliminate and/or reducing the severity of such infestations/infections.

[1415] In some embodiments, a protein exhibiting activity belonging to EC 3.1.1 (or a corresponding formulation, polynucleotide, or organism) is used to prevent, treat, suppress, eliminate and/or reduce the severity of an infestation/infection of a plant or plant part of/by one or more Botrytis (e.g., B. cinerea), Fusarium (e.g., F. graminearum, F. oxysporum, F. virguliforme), Phakopsora (e.g., P. pachyrhizi) and Zymoseptoria (e.g., Z. tritici). For example, a carboxylic ester hydrolase, optionally a protein comprising, consisting essentially of or consisting of an amino acid sequence that is about/at least 60, 61, 62, 63, 64, 65, 66, 67, 68, 69, 70, 71, 72, 73, 74, 75, 76, 77, 78, 79, 80, 81, 82, 83, 84, 85, 86, 87, 88, 89, 90, 91, 92, 93, 94, 95, 96, 97, 98, 99 or 100% identical to one or more of the amino acid sequences set forth herein as SEQ ID NOs: 13, 100-103 and 105, (or a corresponding formulation, polynucleotide, or organism) may be applied to a plant or plant part to prevent, treat, suppress, eliminate and/or reducing the severity of such infestations/infections.

[1416] In some embodiments, a protein exhibiting activity belonging to EC 3.1.1.3 (or a corresponding formulation, polynucleotide, or organism) is used to prevent, treat, suppress, eliminate and/or reduce the severity of an infestation/infection of a plant or plant part of/by one or more Botrytis (e.g., B. cinerea), Fusarium (e.g., F. graminearum, F. oxysporum, F. virguliforme), Phakopsora (e.g., P. pachyrhizi) and Zymoseptoria (e.g., Z. tritici). For example, a triacylglycerol lipase, optionally a protein comprising, consisting essentially of or consisting of an amino acid sequence that is about/at least 60, 61, 62, 63, 64, 65, 66, 67, 68, 69, 70, 71, 72, 73, 74, 75, 76, 77, 78, 79, 80, 81, 82, 83, 84, 85, 86, 87, 88, 89, 90, 91, 92, 93, 94, 95, 96, 97, 98, 99 or 100% identical to one or more of the amino acid sequences set forth herein as SEQ ID NOs: 100-103, (or a corresponding formulation, polynucleotide, or organism) may be applied to a plant or plant part to prevent, treat, suppress, eliminate and/or reducing the severity of such infestations/infections.

[1417] In some embodiments, a protein exhibiting activity belonging to EC 3.1.1.5 (or a corresponding formulation, polynucleotide, or organism) is used to prevent, treat, suppress, eliminate and/or reduce the severity of an infestation/infection of a plant or plant part of/by one or more Botrytis (e.g., B. cinerea), Fusarium (e.g., F. graminearum, F. oxysporum, F. virguliforme), Phakopsora (e.g., P. pachyrhizi) and Zymoseptoria (e.g., Z. tritici). For example, a lysophospholipase, optionally a protein comprising, consisting essentially of or consisting of an amino acid sequence that is about/at least 60, 61, 62, 63, 64, 65, 66, 67, 68, 69, 70, 71, 72, 73, 74, 75, 76, 77, 78, 79, 80, 81, 82, 83, 84, 85, 86, 87, 88, 89, 90, 91, 92, 93, 94, 95, 96, 97, 98, 99 or 100% identical to one or more of the amino acid sequences set forth herein as SEQ ID NOs: 13, (or a corresponding formulation, polynucleotide, or organism) may be applied to a plant or plant part to prevent, treat, suppress, eliminate and/or reducing the severity of such infestations/infections.

[1418] In some embodiments, a protein exhibiting activity belonging to EC 3.1.1.11 (or a corresponding formulation, polynucleotide, or organism) is used to prevent, treat, suppress, eliminate and/or reduce the severity of an infestation/infection of a plant or plant part of/by one or more Botrytis (e.g., B. cinerea), Fusarium (e.g., F. graminearum, F. oxysporum, F. virguliforme), Phakopsora (e.g., P. pachyrhizi) and Zymoseptoria (e.g., Z. tritici). For example, a pectinesterase, optionally a protein comprising, consisting essentially of or consisting of an amino acid sequence that is about/at least 60, 61, 62, 63, 64, 65, 66, 67, 68, 69, 70, 71, 72, 73, 74, 75, 76, 77, 78, 79, 80, 81, 82, 83, 84, 85, 86, 87, 88, 89, 90, 91, 92, 93, 94, 95, 96, 97, 98, 99 or 100% identical to one or more of the amino acid sequences set forth herein as SEQ ID NOs: 105, (or a corresponding formulation, polynucleotide, or organism) may be applied to a plant or plant part to prevent, treat, suppress, eliminate and/or reducing the severity of such infestations/infections.

[1419] In some embodiments, a protein exhibiting activity belonging to EC 3.2 (or a corresponding formulation, polynucleotide, or organism) is used to prevent, treat, suppress, eliminate and/or reduce the severity of an infestation/infection of a plant or plant part of/by one or more Blumeria (e.g., B. graminis), Botrytis (e.g., B. cinerea), Fusarium (e.g., F. graminearum, F. oxysporum, F. virguliforme), Magnaporthe (e.g., M. grisea, M. oryzae), Phakopsora (e.g., P. pachyrhizi), Phytophthora (e.g., P. capsici, P. cinnamomi, P. infestans, P. parasitica, P. ramorum, P. sojae), Pseudoperonospora (e.g., P. cubensis) and Zymoseptoria (e.g., Z. tritici). For example, a glycosylase, optionally a protein comprising, consisting essentially of or consisting of an amino acid sequence that is about/at least 60, 61, 62, 63, 64, 65, 66, 67, 68, 69, 70, 71, 72, 73, 74, 75, 76, 77, 78, 79, 80, 81, 82, 83, 84, 85, 86, 87, 88, 89, 90, 91, 92, 93, 94, 95, 96, 97, 98, 99 or 100% identical to one or more of the amino acid sequences set forth herein as SEQ ID NOs: 14-41 and 109-143, (or a corresponding formulation, polynucleotide, or organism) may be applied to a plant or plant part to prevent, treat, suppress, eliminate and/or reducing the severity of such infestations/infections.

[1420] In some embodiments, a protein exhibiting activity belonging to EC 3.2.1 (or a corresponding formulation, polynucleotide, or organism) is used to prevent, treat, suppress, eliminate and/or reduce the severity of an infestation/infection of a plant or plant part of/by one or more Blumeria (e.g., B. graminis), Botrytis (e.g., B. cinerea), Fusarium (e.g., F. graminearum, F. oxysporum, F. virguliforme), Magnaporthe (e.g., M. grisea, M. oryzae), Phakopsora (e.g., P. pachyrhizi), Phytophthora (e.g., P. capsici, P. cinnamomi, P. infestans, P. parasitica, P. ramorum, P. sojae), Pseudoperonospora (e.g., P. cubensis) and Zymoseptoria (e.g., Z. tritici). For example, a glycosidase, optionally a protein comprising, consisting essentially of or consisting of an amino acid sequence that is about/at least 60, 61, 62, 63, 64, 65, 66, 67, 68, 69, 70, 71, 72, 73, 74, 75, 76, 77, 78, 79, 80, 81, 82, 83, 84, 85, 86, 87, 88, 89, 90, 91, 92, 93, 94, 95, 96, 97, 98, 99 or 100% identical to one or more of the amino acid sequences set forth herein as SEQ ID NOs: 14-41 and 109-143, (or a corresponding formulation, polynucleotide, or organism) may be applied to a plant or plant part to prevent, treat, suppress, eliminate and/or reducing the severity of such infestations/infections.

[1421] In some embodiments, a protein exhibiting activity belonging to EC 3.2.1.1 (or a corresponding formulation, polynucleotide, or organism) is used to prevent, treat, suppress, eliminate and/or reduce the severity of an infestation/infection of a plant or plant part of/by one or more Botrytis (e.g., B. cinerea), Fusarium (e.g., F. graminearum, F. oxysporum, F. virguliforme), Phakopsora (e.g., P. pachyrhizi), Phytophthora (e.g., P. capsici, P. cinnamomi, P. infestans, P. parasitica, P. ramorum, P. sojae) and Zymoseptoria (e.g., Z. tritici). For example, an alpha-amylase, optionally a protein comprising, consisting essentially of or consisting of an amino acid sequence that is about/at least 60, 61, 62, 63, 64, 65, 66, 67, 68, 69, 70, 71, 72, 73, 74, 75, 76, 77, 78, 79, 80, 81, 82, 83, 84, 85, 86, 87, 88, 89, 90, 91, 92, 93, 94, 95, 96, 97, 98, 99 or 100% identical to one or more of the amino acid sequences set forth herein as SEQ ID NOs: 14-16 and 109-111, (or a corresponding formulation, polynucleotide, or organism) may be applied to a plant or plant part to prevent, treat, suppress, eliminate and/or reducing the severity of such infestations/infections.

[1422] In some embodiments, a protein exhibiting activity belonging to EC 3.2.1.3 (or a corresponding formulation, polynucleotide, or organism) is used to prevent, treat, suppress, eliminate and/or reduce the severity of an infestation/infection of a plant or plant part of/by one or more Botrytis (e.g., B. cinerea), Fusarium (e.g., F. graminearum, F. oxysporum, F. virguliforme), Phakopsora (e.g., P. pachyrhizi) and Zymoseptoria (e.g., Z. tritici). For example, a glucan 1,4-alpha-glucosidase, optionally a protein comprising, consisting essentially of or consisting of an amino acid sequence that is about/at least 60, 61, 62, 63, 64, 65, 66, 67, 68, 69, 70, 71, 72, 73, 74, 75, 76, 77, 78, 79, 80, 81, 82, 83, 84, 85, 86, 87, 88, 89, 90, 91, 92, 93, 94, 95, 96, 97, 98, 99 or 100% identical to one or more of the amino acid sequences set forth herein as SEQ ID NOs: 17-18, (or a corresponding formulation, polynucleotide, or organism) may be applied to a plant or plant part to prevent, treat, suppress, eliminate and/or reducing the severity of such infestations/infections.

[1423] In some embodiments, a protein exhibiting activity belonging to EC 3.2.1.4 (or a corresponding formulation, polynucleotide, or organism) is used to prevent, treat, suppress, eliminate and/or reduce the severity of an infestation/infection of a plant or plant part of/by one or more Botrytis (e.g., B. cinerea), Fusarium (e.g., F. graminearum, F. oxysporum, F. virguliforme) and Phakopsora (e.g., P. pachyrhizi). For example, a cellulase, optionally a protein comprising, consisting essentially of or consisting of an amino acid sequence that is about/at least 60, 61, 62, 63, 64, 65, 66, 67, 68, 69, 70, 71, 72, 73, 74, 75, 76, 77, 78, 79, 80, 81, 82, 83, 84, 85, 86, 87, 88, 89, 90, 91, 92, 93, 94, 95, 96, 97, 98, 99 or 100% identical to one or more of the amino acid sequences set forth herein as SEQ ID NOs: 19 and 114-116, (or a corresponding formulation, polynucleotide, or organism) may be applied to a plant or plant part to prevent, treat, suppress, eliminate and/or reducing the severity of such infestations/infections.

[1424] In some embodiments, a protein exhibiting activity belonging to EC 3.2.1.6 (or a corresponding formulation, polynucleotide, or organism) is used to prevent, treat, suppress, eliminate and/or reduce the severity of an infestation/infection of a plant or plant part of/by one or more Botrytis (e.g., B. cinerea), Fusarium (e.g., F. graminearum, F. oxysporum, F. virguliforme), Magnaporthe (e.g., M. grisea, M. oryzae), Phakopsora (e.g., P. pachyrhizi) and Zymoseptoria (e.g., Z. tritici). For example, an endo-1,3(4)-beta-glucanase, optionally a protein comprising, consisting essentially of or consisting of an amino acid sequence that is about/at least 60, 61, 62, 63, 64, 65, 66, 67, 68, 69, 70, 71, 72, 73, 74, 75, 76, 77, 78, 79, 80, 81, 82, 83, 84, 85, 86, 87, 88, 89, 90, 91, 92, 93, 94, 95, 96, 97, 98, 99 or 100% identical to one or more of the amino acid sequences set forth herein as SEQ ID NOs: 20, (or a corresponding formulation, polynucleotide, or organism) may be applied to a plant or plant part to prevent, treat, suppress, eliminate and/or reducing the severity of such infestations/infections.

[1425] In some embodiments, a protein exhibiting activity belonging to EC 3.2.1.7 (or a corresponding formulation, polynucleotide, or organism) is used to prevent, treat, suppress, eliminate and/or reduce the severity of an infestation/infection of a plant or plant part of/by one or more Botrytis (e.g., B. cinerea) and Fusarium (e.g., F. graminearum, F. oxysporum, F. virguliforme). For example, a inulinase, optionally a protein comprising, consisting essentially of or consisting of an amino acid sequence that is about/at least 60, 61, 62, 63, 64, 65, 66, 67, 68, 69, 70, 71, 72, 73, 74, 75, 76, 77, 78, 79, 80, 81, 82, 83, 84, 85, 86, 87, 88, 89, 90, 91, 92, 93, 94, 95, 96, 97, 98, 99 or 100% identical to one or more of the amino acid sequences set forth herein as SEQ ID NOs: 117, (or a corresponding formulation, polynucleotide, or organism) may be applied to a plant or plant part to prevent, treat, suppress, eliminate and/or reducing the severity of such infestations/infections.

[1426] In some embodiments, a protein exhibiting activity belonging to EC 3.2.1.8 (or a corresponding formulation, polynucleotide, or organism) is used to prevent, treat, suppress, eliminate and/or reduce the severity of an infestation/infection of a plant or plant part of/by one or more Blumeria (e.g., B. graminis), Botrytis (e.g., B. cinerea), Fusarium (e.g., F. graminearum, F. oxysporum, F. virguliforme), Phakopsora (e.g., P. pachyrhizi), Phytophthora (e.g., P. capsici, P. cinnamomi, P. infestans, P. parasitica, P. ramorum, P. sojae), Pseudoperonospora (e.g., P. cubensis) and Zymoseptoria (e.g., Z. tritici). For example, a endo-1,4-beta-xylanase, optionally a protein comprising, consisting essentially of or consisting of an amino acid sequence that is about/at least 60, 61, 62, 63, 64, 65, 66, 67, 68, 69, 70, 71, 72, 73, 74, 75, 76, 77, 78, 79, 80, 81, 82, 83, 84, 85, 86, 87, 88, 89, 90, 91, 92, 93, 94, 95, 96, 97, 98, 99 or 100% identical to one or more of the amino acid sequences set forth herein as SEQ ID NOs: 21-24 and 119, (or a corresponding formulation, polynucleotide, or organism) may be applied to a plant or plant part to prevent, treat, suppress, eliminate and/or reducing the severity of such infestations/infections.

[1427] In some embodiments, a protein exhibiting activity belonging to belonging to EC 3.2.1.11 (or a corresponding formulation, polynucleotide, or organism) is used to prevent, treat, suppress, eliminate and/or reduce the severity of an infestation/infection of a plant or plant part of/by one or more Botrytis (e.g., B. cinerea), Fusarium (e.g., F. graminearum, F. oxysporum, F. virgulforme) and Zymoseptoria (e.g., Z. tritici). For example, a dextranase, optionally a protein comprising, consisting essentially of or consisting of an amino acid sequence that is about/at least 60, 61, 62, 63, 64, 65, 66, 67, 68, 69, 70, 71, 72, 73, 74, 75, 76, 77, 78, 79, 80, 81, 82, 83, 84, 85, 86, 87, 88, 89, 90, 91, 92, 93, 94, 95, 96, 97, 98, 99 or 100% identical to one or more of the amino acid sequences set forth herein as SEQ ID NOs: 25, (or a corresponding formulation, polynucleotide, or organism) may be applied to a plant or plant part to prevent, treat, suppress, eliminate and/or reducing the severity of such infestations/infections.

[1428] In some embodiments, a protein exhibiting activity belonging to belonging to EC 3.2.1.15 (or a corresponding formulation, polynucleotide, or organism) is used to prevent, treat, suppress, eliminate and/or reduce the severity of an infestation/infection of a plant or plant part of/by one or more Blumeria (e.g., B. graminis), Botrytis (e.g., B. cinerea), Fusarium (e.g., F. graminearum, F. oxysporum, F. virguliforme), Phakopsora (e.g., P. pachyrhizi) and Zymoseptoria (e.g., Z. tritici). For example, a endo-polygalacturonase (pectinase), optionally a protein comprising, consisting essentially of or consisting of an amino acid sequence that is about/at least 60, 61, 62, 63, 64, 65, 66, 67, 68, 69, 70, 71, 72, 73, 74, 75, 76, 77, 78, 79, 80, 81, 82, 83, 84, 85, 86, 87, 88, 89, 90, 91, 92, 93, 94, 95, 96, 97, 98, 99 or 100% identical to one or more of the amino acid sequences set forth herein as SEQ ID NOs: 125, (or a corresponding formulation, polynucleotide, or organism) may be applied to a plant or plant part to prevent, treat, suppress, eliminate and/or reducing the severity of such infestations/infections.

[1429] In some embodiments, a protein exhibiting activity belonging to belonging to EC 3.2.1.17 (or a corresponding formulation, polynucleotide, or organism) is used to prevent, treat, suppress, eliminate and/or reduce the severity of an infestation/infection of a plant or plant part of/by one or more Botrytis (e.g., B. cinerea). For example, a lysozyme, optionally a protein comprising, consisting essentially of or consisting of an amino acid sequence that is about/at least 60, 61, 62, 63, 64, 65, 66, 67, 68, 69, 70, 71, 72, 73, 74, 75, 76, 77, 78, 79, 80, 81, 82, 83, 84, 85, 86, 87, 88, 89, 90, 91, 92, 93, 94, 95, 96, 97, 98, 99 or 100% identical to one or more of the amino acid sequences set forth herein as SEQ ID NOs: 26, (or a corresponding formulation, polynucleotide, or organism) may be applied to a plant or plant part to prevent, treat, suppress, eliminate and/or reducing the severity of such infestations/infections.

[1430] In some embodiments, a protein exhibiting activity belonging to belonging to EC 3.2.1.21 (or a corresponding formulation, polynucleotide, or organism) is used to prevent, treat, suppress, eliminate and/or reduce the severity of an infestation/infection of a plant or plant part of/by one or more Magnaporthe (e.g., M. grisea, M. oryzae), Penicillium (e.g., P. digitatum, P. expansum, P. italicum, P. rugulosum, P. verrucosum), and Phytophthora (e.g., P. capsici, P. cinnamomi, P. infestans, P. parasitica, P. ramorum, P. sojae). For example, a beta-glucosidase, optionally a protein comprising, consisting essentially of or consisting of an amino acid sequence that is about/at least 60, 61, 62, 63, 64, 65, 66, 67, 68, 69, 70, 71, 72, 73, 74, 75, 76, 77, 78, 79, 80, 81, 82, 83, 84, 85, 86, 87, 88, 89, 90, 91, 92, 93, 94, 95, 96, 97, 98, 99 or 100% identical to one or more of the amino acid sequences set forth herein as SEQ ID NOs: 126, (or a corresponding formulation, polynucleotide, or organism) may be applied to a plant or plant part to prevent, treat, suppress, eliminate and/or reducing the severity of such infestations/infections.

[1431] In some embodiments, a protein exhibiting activity belonging to belonging to EC 3.2.1.39 (or a corresponding formulation, polynucleotide, or organism) is used to prevent, treat, suppress, eliminate and/or reduce the severity of an infestation/infection of a plant or plant part of/by one or more Botrytis (e.g., B. cinerea), Fusarium (e.g., F. graminearum, F. oxysporum, F. virguliforme) and Zymoseptoria (e.g., Z. tritici). For example, a glucan endo-1,3-beta-D-glucosidase, optionally a protein comprising, consisting essentially of or consisting of an amino acid sequence that is about/at least 60, 61, 62, 63, 64, 65, 66, 67, 68, 69, 70, 71, 72, 73, 74, 75, 76, 77, 78, 79, 80, 81, 82, 83, 84, 85, 86, 87, 88, 89, 90, 91, 92, 93, 94, 95, 96, 97, 98, 99 or 100% identical to one or more of the amino acid sequences set forth herein as SEQ ID NOs: 27-28, (or a corresponding formulation, polynucleotide, or organism) may be applied to a plant or plant part to prevent, treat, suppress, eliminate and/or reducing the severity of such infestations/infections.

[1432] In some embodiments, a protein exhibiting activity belonging to belonging to EC 3.2.1.41 (or a corresponding formulation, polynucleotide, or organism) is used to prevent, treat, suppress, eliminate and/or reduce the severity of an infestation/infection of a plant or plant part of/by one or more Botrytis (e.g., B. cinerea), Fusarium (e.g., F. graminearum, F. oxysporum, F. virguliforme), Phakopsora (e.g., P. pachyrhizi) and Zymoseptoria (e.g., Z. tritici). For example, a pullulanase, optionally a protein comprising, consisting essentially of or consisting of an amino acid sequence that is about/at least 60, 61, 62, 63, 64, 65, 66, 67, 68, 69, 70, 71, 72, 73, 74, 75, 76, 77, 78, 79, 80, 81, 82, 83, 84, 85, 86, 87, 88, 89, 90, 91, 92, 93, 94, 95, 96, 97, 98, 99 or 100% identical to one or more of the amino acid sequences set forth herein as SEQ ID NOs: 29, (or a corresponding formulation, polynucleotide, or organism) may be applied to a plant or plant part to prevent, treat, suppress, eliminate and/or reducing the severity of such infestations/infections.

[1433] In some embodiments, a protein exhibiting activity belonging to belonging to EC 3.2.1.55 (or a corresponding formulation, polynucleotide, or organism) is used to prevent, treat, suppress, eliminate and/or reduce the severity of an infestation/infection of a plant or plant part of/by one or more Penicillium (e.g., P. digitatum, P. expansum, P. italicum, P. rugulosum, P. verrucosum). For example, an alpha-L-arabinofuranosidase, optionally a protein comprising, consisting essentially of or consisting of an amino acid sequence that is about/at least 60, 61, 62, 63, 64, 65, 66, 67, 68, 69, 70, 71, 72, 73, 74, 75, 76, 77, 78, 79, 80, 81, 82, 83, 84, 85, 86, 87, 88, 89, 90, 91, 92, 93, 94, 95, 96, 97, 98, 99 or 100% identical to one or more of the amino acid sequences set forth herein as SEQ ID NOs: 129, (or a corresponding formulation, polynucleotide, or organism) may be applied to a plant or plant part to prevent, treat, suppress, eliminate and/or reducing the severity of such infestations/infections.

[1434] In some embodiments, a protein exhibiting activity belonging to belonging to EC 3.2.1.58 (or a corresponding formulation, polynucleotide, or organism) is used to prevent, treat, suppress, eliminate and/or reduce the severity of an infestation/infection of a plant or plant part of/by one or more Botrytis (e.g., B. cinerea), Fusarium (e.g., F. graminearum, F. oxysporum, F. virguliforme), Phakopsora (e.g., P. pachyrhizi) and Zymoseptoria (e.g., Z. tritici). For example, a glucan 1,3-beta-glucosidase (or a corresponding formulation, polynucleotide, or organism) may be applied to a plant or plant part to prevent, treat, suppress, eliminate and/or reducing the severity of such infestations/infections.

[1435] In some embodiments, a protein exhibiting activity belonging to belonging to EC 3.2.1.59 (or a corresponding formulation, polynucleotide, or organism) is used to prevent, treat, suppress, eliminate and/or reduce the severity of an infestation/infection of a plant or plant part of/by one or more Zymoseptoria (e.g., Z. tritici). For example, a glucan endo-1,3-alpha-glucosidase, optionally a protein comprising, consisting essentially of or consisting of an amino acid sequence that is about/at least 60, 61, 62, 63, 64, 65, 66, 67, 68, 69, 70, 71, 72, 73, 74, 75, 76, 77, 78, 79, 80, 81, 82, 83, 84, 85, 86, 87, 88, 89, 90, 91, 92, 93, 94, 95, 96, 97, 98, 99 or 100% identical to one or more of the amino acid sequences set forth herein as SEQ ID NOs: 30, (or a corresponding formulation, polynucleotide, or organism) may be applied to a plant or plant part to prevent, treat, suppress, eliminate and/or reducing the severity of such infestations/infections.

[1436] In some embodiments, a protein exhibiting activity belonging to belonging to EC 3.2.1.73 (or a corresponding formulation, polynucleotide, or organism) is used to prevent, treat, suppress, eliminate and/or reduce the severity of an infestation/infection of a plant or plant part of/by one or more Fusarium (e.g., F. graminearum, F. oxysporum, F. virgulforme). For example, a licheninase, optionally a protein comprising, consisting essentially of or consisting of an amino acid sequence that is about/at least 60, 61, 62, 63, 64, 65, 66, 67, 68, 69, 70, 71, 72, 73, 74, 75, 76, 77, 78, 79, 80, 81, 82, 83, 84, 85, 86, 87, 88, 89, 90, 91, 92, 93, 94, 95, 96, 97, 98, 99 or 100% identical to one or more of the amino acid sequences set forth herein as SEQ ID NOs: 132, (or a corresponding formulation, polynucleotide, or organism) may be applied to a plant or plant part to prevent, treat, suppress, eliminate and/or reducing the severity of such infestations/infections.

[1437] In some embodiments, a protein exhibiting activity belonging to belonging to EC 3.2.1.75 (or a corresponding formulation, polynucleotide, or organism) is used to prevent, treat, suppress, eliminate and/or reduce the severity of an infestation/infection of a plant or plant part of/by one or more Botrytis (e.g., B. cinerea), Fusarium (e.g., F. graminearum, F. oxysporum, F. virguliforme) and Zymoseptoria (e.g., Z. tritici). For example, a glucan endo-1,6-beta-glucosidase, optionally a protein comprising, consisting essentially of or consisting of an amino acid sequence that is about/at least 60, 61, 62, 63, 64, 65, 66, 67, 68, 69, 70, 71, 72, 73, 74, 75, 76, 77, 78, 79, 80, 81, 82, 83, 84, 85, 86, 87, 88, 89, 90, 91, 92, 93, 94, 95, 96, 97, 98, 99 or 100% identical to one or more of the amino acid sequences set forth herein as SEQ ID NOs: 31-32, (or a corresponding formulation, polynucleotide, or organism) may be applied to a plant or plant part to prevent, treat, suppress, eliminate and/or reducing the severity of such infestations/infections.

[1438] In some embodiments, a protein exhibiting activity belonging to belonging to EC 3.2.1.78 (or a corresponding formulation, polynucleotide, or organism) is used to prevent, treat, suppress, eliminate and/or reduce the severity of an infestation/infection of a plant or plant part of/by one or more Botrytis (e.g., B. cinerea), Fusarium (e.g., F. graminearum, F. oxysporum, F. virguliforme), Pseudoperonospora (e.g., P. cubensis) and Zymoseptoria (e.g., Z. tritici).

[1439] For example, a mannan endo-1,4-beta-mannosidase, optionally a protein comprising, consisting essentially of or consisting of an amino acid sequence that is about/at least 60, 61, 62, 63, 64, 65, 66, 67, 68, 69, 70, 71, 72, 73, 74, 75, 76, 77, 78, 79, 80, 81, 82, 83, 84, 85, 86, 87, 88, 89, 90, 91, 92, 93, 94, 95, 96, 97, 98, 99 or 100% identical to one or more of the amino acid sequences set forth herein as SEQ ID NOs: 33, (or a corresponding formulation, polynucleotide, or organism) may be applied to a plant or plant part to prevent, treat, suppress, eliminate and/or reducing the severity of such infestations/infections.

[1440] In some embodiments, a protein exhibiting activity belonging to belonging to EC 3.2.1.101 (or a corresponding formulation, polynucleotide, or organism) is used to prevent, treat, suppress, eliminate and/or reduce the severity of an infestation/infection of a plant or plant part of/by one or more Fusarium (e.g., F. graminearum, F. oxysporum, F. virguliforme) and Zymoseptoria (e.g., Z. tritici). Pro For example, a protein teins comprising, consisting essentially of or consisting of an amino acid sequence that is about/at least 60, 61, 62, 63, 64, 65, 66, 67, 68, 69, 70, 71, 72, 73, 74, 75, 76, 77, 78, 79, 80, 81, 82, 83, 84, 85, 86, 87, 88, 89, 90, 91, 92, 93, 94, 95, 96, 97, 98, 99 or 100% identical to one or more of the amino acid sequences set forth herein as SEQ ID NOs: 34 (or a corresponding formulation, polynucleotide, or organism) may be applied to a plant or plant part to prevent, treat, suppress, eliminate and/or reducing the severity of such infestations/infections. For example, a mannan endo-1,6-alpha-mannosidase (or a corresponding formulation, polynucleotide, or organism) may be applied to a plant or plant part to prevent, treat, suppress, eliminate and/or reducing the severity of such infestations/infections.

[1441] In some embodiments, a protein exhibiting activity belonging to belonging to EC 3.2.1.109 (or a corresponding formulation, polynucleotide, or organism) is used to prevent, treat, suppress, eliminate and/or reduce the severity of an infestation/infection of a plant or plant part of/by one or more Botrytis (e.g., B. cinerea), Fusarium (e.g., F. graminearum, F. oxysporum, F. virguliforme) and Zymoseptoria (e.g., Z. tritici). For example, a endogalactosaminidase, optionally a protein comprising, consisting essentially of or consisting of an amino acid sequence that is about/at least 60, 61, 62, 63, 64, 65, 66, 67, 68, 69, 70, 71, 72, 73, 74, 75, 76, 77, 78, 79, 80, 81, 82, 83, 84, 85, 86, 87, 88, 89, 90, 91, 92, 93, 94, 95, 96, 97, 98, 99 or 100% identical to one or more of the amino acid sequences set forth herein as SEQ ID NOs: 35-40, (or a corresponding formulation, polynucleotide, or organism) may be applied to a plant or plant part to prevent, treat, suppress, eliminate and/or reducing the severity of such infestations/infections.

[1442] In some embodiments, a protein exhibiting activity belonging to belonging to EC 3.2.1.133 (or a corresponding formulation, polynucleotide, or organism) is used to prevent, treat, suppress, eliminate and/or reduce the severity of an infestation/infection of a plant or plant part of/by one or more Botrytis (e.g., B. cinerea), Fusarium (e.g., F. graminearum, F. oxysporum, F. virguliforme) and Zymoseptoria (e.g., Z. tritici). For example, a glucan 1,4-alpha-maltohydrase, optionally a protein comprising, consisting essentially of or consisting of an amino acid sequence that is about/at least 60, 61, 62, 63, 64, 65, 66, 67, 68, 69, 70, 71, 72, 73, 74, 75, 76, 77, 78, 79, 80, 81, 82, 83, 84, 85, 86, 87, 88, 89, 90, 91, 92, 93, 94, 95, 96, 97, 98, 99 or 100% identical to one or more of the amino acid sequences set forth herein as SEQ ID NOs: 41, (or a corresponding formulation, polynucleotide, or organism) may be applied to a plant or plant part to prevent, treat, suppress, eliminate and/or reducing the severity of such infestations/infections.

[1443] In some embodiments, a protein exhibiting activity belonging to belonging to EC 3.4 (or a corresponding formulation, polynucleotide, or organism) is used to prevent, treat, suppress, eliminate and/or reduce the severity of an infestation/infection of a plant or plant part of/by one or more Blumeria (e.g., B. graminis), Botrytis (e.g., B. cinerea), Fusarium (e.g., F. graminearum, F. oxysporum, F. virgulforme), Magnaporthe (e.g., M. grisea, M. oryzae), Phakopsora (e.g., P. pachyrhizi), Phytophthora (e.g., P. capsici, P. cinnamomi, P. infestans, P. parasitica, P. ramorum, P. sojae), Pseudoperonospora (e.g., P. cubensis) and Zymoseptoria (e.g., Z. tritici). For example, a peptidases, optionally a protein comprising, consisting essentially of or consisting of an amino acid sequence that is about/at least 60, 61, 62, 63, 64, 65, 66, 67, 68, 69, 70, 71, 72, 73, 74, 75, 76, 77, 78, 79, 80, 81, 82, 83, 84, 85, 86, 87, 88, 89, 90, 91, 92, 93, 94, 95, 96, 97, 98, 99 or 100% identical to one or more of the amino acid sequences set forth herein as SEQ ID NOs: 42-48, (or a corresponding formulation, polynucleotide, or organism) may be applied to a plant or plant part to prevent, treat, suppress, eliminate and/or reducing the severity of such infestations/infections.

[1444] In some embodiments, a protein exhibiting activity belonging to belonging to EC 3.4.11 (or a corresponding formulation, polynucleotide, or organism) is used to prevent, treat, suppress, eliminate and/or reduce the severity of an infestation/infection of a plant or plant part of/by one or more Botrytis (e.g., B. cinerea), Fusarium (e.g., F. graminearum, F. oxysporum, F. virguliforme), Phakopsora (e.g., P. pachyrhizi) and Zymoseptoria (e.g., Z. tritici). For example, an aminopeptidase (or a corresponding formulation, polynucleotide, or organism) may be applied to a plant or plant part to prevent, treat, suppress, eliminate and/or reducing the severity of such infestations/infections.

[1445] In some embodiments, a protein exhibiting activity belonging to belonging to EC 3.4.11.1 (or a corresponding formulation, polynucleotide, or organism) is used to prevent, treat, suppress, eliminate and/or reduce the severity of an infestation/infection of a plant or plant part of/by one or more Botrytis (e.g., B. cinerea), Fusarium (e.g., F. graminearum, F. oxysporum, F. virguliforme), Phakopsora (e.g., P. pachyrhizi) and Zymoseptoria (e.g., Z. tritici). For example, a leucyl aminopeptidase (or a corresponding formulation, polynucleotide, or organism) may be applied to a plant or plant part to prevent, treat, suppress, eliminate and/or reducing the severity of such infestations/infections.

[1446] In some embodiments, a protein exhibiting activity belonging to belonging to EC 3.4.21 (or a corresponding formulation, polynucleotide, or organism) is used to prevent, treat, suppress, eliminate and/or reduce the severity of an infestation/infection of a plant or plant part of/by one or more Blumeria (e.g., B. graminis), Botrytis (e.g., B. cinerea), Fusarium (e.g., F. graminearum, F. oxysporum, F. virguliforme), Magnaporthe (e.g., M. grisea, M. oryzae), Phakopsora (e.g., P. pachyrhizi), Phytophthora (e.g., P. capsici, P. cinnamomi, P. infestans, P. parasitica, P. ramorum, P. sojae), Pseudoperonospora (e.g., P. cubensis) and Zymoseptoria (e.g., Z. tritici). For example, a serine endopeptidase, optionally a protein comprising, consisting essentially of or consisting of an amino acid sequence that is about/at least 60, 61, 62, 63, 64, 65, 66, 67, 68, 69, 70, 71, 72, 73, 74, 75, 76, 77, 78, 79, 80, 81, 82, 83, 84, 85, 86, 87, 88, 89, 90, 91, 92, 93, 94, 95, 96, 97, 98, 99 or 100% identical to one or more of the amino acid sequences set forth herein as SEQ ID NOs: 42-47, (or a corresponding formulation, polynucleotide, or organism) may be applied to a plant or plant part to prevent, treat, suppress, eliminate and/or reducing the severity of such infestations/infections.

[1447] In some embodiments, a protein exhibiting activity belonging to belonging to EC 3.4.21.19 (or a corresponding formulation, polynucleotide, or organism) is used to prevent, treat, suppress, eliminate and/or reduce the severity of an infestation/infection of a plant or plant part of/by one or more Fusarium (e.g., F. graminearum, F. oxysporum, F. virguliforme), Phakopsora (e.g., P. pachyrhizi), Phytophthora (e.g., P. capsici, P. cinnamomi, P. infestans, P. parasitica, P. ramorum, P. sojae) and Pseudoperonospora (e.g., P. cubensis). For example, a glutamyl endopeptidase, optionally a protein comprising, consisting essentially of or consisting of an amino acid sequence that is about/at least 60, 61, 62, 63, 64, 65, 66, 67, 68, 69, 70, 71, 72, 73, 74, 75, 76, 77, 78, 79, 80, 81, 82, 83, 84, 85, 86, 87, 88, 89, 90, 91, 92, 93, 94, 95, 96, 97, 98, 99 or 100% identical to one or more of the amino acid sequences set forth herein as SEQ ID NOs: 43, (or a corresponding formulation, polynucleotide, or organism) may be applied to a plant or plant part to prevent, treat, suppress, eliminate and/or reducing the severity of such infestations/infections.

[1448] In some embodiments, a protein exhibiting activity belonging to belonging to EC 3.4.21.62 (or a corresponding formulation, polynucleotide, or organism) is used to prevent, treat, suppress, eliminate and/or reduce the severity of an infestation/infection of a plant or plant part of/by one or more Botrytis (e.g., B. cinerea), Fusarium (e.g., F. graminearum, F. oxysporum, F. virguliforme), Phakopsora (e.g., P. pachyrhizi), Phytophthora (e.g., P. capsici, P. cinnamomi, P. infestans, P. parasitica, P. ramorum, P. sojae), Pseudoperonospora (e.g., P. cubensis) and Zymoseptoria (e.g., Z. tritici). For example, a subtilisin, optionally a protein comprising, consisting essentially of or consisting of an amino acid sequence that is about/at least 60, 61, 62, 63, 64, 65, 66, 67, 68, 69, 70, 71, 72, 73, 74, 75, 76, 77, 78, 79, 80, 81, 82, 83, 84, 85, 86, 87, 88, 89, 90, 91, 92, 93, 94, 95, 96, 97, 98, 99 or 100% identical to one or more of the amino acid sequences set forth herein as SEQ ID NOs: 44-47, (or a corresponding formulation, polynucleotide, or organism) may be applied to a plant or plant part to prevent, treat, suppress, eliminate and/or reducing the severity of such infestations/infections.

[1449] In some embodiments, a protein exhibiting activity belonging to belonging to EC 3.4.24 (or a corresponding formulation, polynucleotide, or organism) is used to prevent, treat, suppress, eliminate and/or reduce the severity of an infestation/infection of a plant or plant part of/by one or more Botrytis (e.g., B. cinerea), Fusarium (e.g., F. graminearum, F. oxysporum, F. virguliforme), Phakopsora (e.g., P. pachyrhizi), Phytophthora (e.g., P. capsici, P. cinnamomi, P. infestans, P. parasitica, P. ramorum, P. sojae) and Zymoseptoria (e.g., Z. tritici). For example, a metalloendopeptidase, optionally a protein comprising, consisting essentially of or consisting of an amino acid sequence that is about/at least 60, 61, 62, 63, 64, 65, 66, 67, 68, 69, 70, 71, 72, 73, 74, 75, 76, 77, 78, 79, 80, 81, 82, 83, 84, 85, 86, 87, 88, 89, 90, 91, 92, 93, 94, 95, 96, 97, 98, 99 or 100% identical to one or more of the amino acid sequences set forth herein as SEQ ID NOs: 48, (or a corresponding formulation, polynucleotide, or organism) may be applied to a plant or plant part to prevent, treat, suppress, eliminate and/or reducing the severity of such infestations/infections.

[1450] In some embodiments, a protein exhibiting activity belonging to belonging to EC 3.4.24.28 (or a corresponding formulation, polynucleotide, or organism) is used to prevent, treat, suppress, eliminate and/or reduce the severity of an infestation/infection of a plant or plant part of/by one or more Botrytis (e.g., B. cinerea), Fusarium (e.g., F. graminearum, F. oxysporum, F. virguliforme), Phakopsora (e.g., P. pachyrhizi), Phytophthora (e.g., P. capsici, P. cinnamomi, P. infestans, P. parasitica, P. ramorum, P. sojae) and Zymoseptoria (e.g., Z. tritici). For example, a bacillolycin, optionally a protein comprising, consisting essentially of or consisting of an amino acid sequence that is about/at least 60, 61, 62, 63, 64, 65, 66, 67, 68, 69, 70, 71, 72, 73, 74, 75, 76, 77, 78, 79, 80, 81, 82, 83, 84, 85, 86, 87, 88, 89, 90, 91, 92, 93, 94, 95, 96, 97, 98, 99 or 100% identical to one or more of the amino acid sequences set forth herein as SEQ ID NOs: 48, (or a corresponding formulation, polynucleotide, or organism) may be applied to a plant or plant part to prevent, treat, suppress, eliminate and/or reducing the severity of such infestations/infections.

[1451] In some embodiments, a protein exhibiting activity belonging to belonging to EC 4.2 (or a corresponding formulation, polynucleotide, or organism) is used to prevent, treat, suppress, eliminate and/or reduce the severity of an infestation/infection of a plant or plant part of/by one or more Botrytis (e.g., B. cinerea), Fusarium (e.g., F. graminearum, F. oxysporum, F. virguliforme), Penicillium (e.g., P. digitatum, P. expansum, P. italicum, P. rugulosum, P. verrucosum), and Zymoseptoria (e.g., Z. tritici). For example, a carbon-oxygen lyase, optionally a protein comprising, consisting essentially of or consisting of an amino acid sequence that is about/at least 60, 61, 62, 63, 64, 65, 66, 67, 68, 69, 70, 71, 72, 73, 74, 75, 76, 77, 78, 79, 80, 81, 82, 83, 84, 85, 86, 87, 88, 89, 90, 91, 92, 93, 94, 95, 96, 97, 98, 99 or 100% identical to one or more of the amino acid sequences set forth herein as SEQ ID NOs: 149, (or a corresponding formulation, polynucleotide, or organism) may be applied to a plant or plant part to prevent, treat, suppress, eliminate and/or reducing the severity of such infestations/infections.

[1452] In some embodiments, a protein exhibiting activity belonging to belonging to EC 4.2.2 (or a corresponding formulation, polynucleotide, or organism) is used to prevent, treat, suppress, eliminate and/or reduce the severity of an infestation/infection of a plant or plant part of/by one or more Botrytis (e.g., B. cinerea), Fusarium (e.g., F. graminearum, F. oxysporum, F. virguliforme), Penicillium (e.g., P. digitatum, P. expansum, P. italicum, P. rugulosum, P. verrucosum), and Zymoseptoria (e.g., Z. tritici). For example, a polysaccharide lyase, optionally a protein comprising, consisting essentially of or consisting of an amino acid sequence that is about/at least 60, 61, 62, 63, 64, 65, 66, 67, 68, 69, 70, 71, 72, 73, 74, 75, 76, 77, 78, 79, 80, 81, 82, 83, 84, 85, 86, 87, 88, 89, 90, 91, 92, 93, 94, 95, 96, 97, 98, 99 or 100% identical to one or more of the amino acid sequences set forth herein as SEQ ID NOs: 149, (or a corresponding formulation, polynucleotide, or organism) may be applied to a plant or plant part to prevent, treat, suppress, eliminate and/or reducing the severity of such infestations/infections.

[1453] In some embodiments, a protein exhibiting activity belonging to belonging to EC 4.2.2.2 (or a corresponding formulation, polynucleotide, or organism) is used to prevent, treat, suppress, eliminate and/or reduce the severity of an infestation/infection of a plant or plant part of/by one or more Botrytis (e.g., B. cinerea), Fusarium (e.g., F. graminearum, F. oxysporum, F. virguliforme), Penicillium (e.g., P. digitatum, P. expansum, P. italicum, P. rugulosum, P. verrucosum), and Zymoseptoria (e.g., Z. tritici). For example, a pectate lyase, optionally a protein comprising, consisting essentially of or consisting of an amino acid sequence that is about/at least 60, 61, 62, 63, 64, 65, 66, 67, 68, 69, 70, 71, 72, 73, 74, 75, 76, 77, 78, 79, 80, 81, 82, 83, 84, 85, 86, 87, 88, 89, 90, 91, 92, 93, 94, 95, 96, 97, 98, 99 or 100% identical to one or more of the amino acid sequences set forth herein as SEQ ID NOs: 149, (or a corresponding formulation, polynucleotide, or organism) may be applied to a plant or plant part to prevent, treat, suppress, eliminate and/or reducing the severity of such infestations/infections.

[1454] Compositions of the present disclosure may be applied to any plant type, including, but not limited to, row crops and vegetables. In some embodiments, compositions of the present disclosure are formulated for the treatment of one or more plants selected from the families Amaranthaceae (e.g., chard, spinach, sugar beet, quinoa), Asteraceae (e.g., artichoke, asters, chamomile, chicory, chrysanthemums, dahlias, daisies, echinacea, goldenrod, guayule, lettuce, marigolds, safflower, sunflowers, zinnias), Brassicaceae (e.g., arugula, broccoli, bok choy, Brussels sprouts, cabbage, cauliflower, canola, collard greens, daikon, garden cress, horseradish, kale, mustard, radish, rapeseed, rutabaga, turnip, wasabi, watercress, Arabidopsis thaliana), Caricaceae (e.g., papaya), Cucurbitaceae (e.g., cantaloupe, cucumber, honeydew, melon, pumpkin, squash (e.g., acorn squash, butternut squash, summer squash), watermelon, zucchini), Fabaceae (e.g., alfalfa, beans, carob, clover, guar, lentils, mesquite, peas, peanuts, soybeans, tamarind, tragacanth, vetch), Malvaceae (e.g., cacao, cotton, durian, hibiscus, kenaf, kola, okra), Poaceae (e.g., bamboo, barley, corn, fonio, lawn grass (e.g., Bahia grass, Bermudagrass, bluegrass, Buffalograss, Centipede grass, Fescue, or Zoysia), millet, oats, ornamental grasses, rice, rye, sorghum, sugar cane, triticale, wheat and other cereal crops, Polygonaceae (e.g., buckwheat), Rosaceae (e.g., almonds, apples, apricots, blackberry, blueberry, cherries, peaches, plums, quinces, raspberries, roses, strawberries), Solanaceae (e.g., bell peppers, chili peppers, eggplant, petunia, potato, tobacco, tomato) and Vitaceae (e.g., grape).

[1455] Non-limiting examples of plants that may be treated with compositions of the present disclosure include plants sold under the ACCELERON®, AGRIPRO®, AGRISURE®, AGROESTE®, AGVENTURE®, ALFOREX™ ASGROW®, AQUAMAX®, BOLLGARD II™, BOLLGARD™ 3, BREVANT™, CHANNEL™, CONFIDOR™, CORTEVA AGRISCIENCE™, CORVUS™, CREDENZ®, CROPSTAR™, DAIRYLAND™, DEKALB®, DELTAPINE™, DERUITER™, DROUGHTGARD®, ENLIST E3®, ENOGEN®, FIBERMAX®, GAUCHO™ GENUITY®, GOLDENHARVEST®, HOEGEMEYER™, INTACTA RR2 PRO™, INVIGOR®, LIBERTY LINK®, NEXGROW®, NK®, NUTECH SEED®, OPTIMUM®, PHYTOGEN®, PIONEER®, QROME®, RIB COMPLETE®, ROUNDUP READY®, ROUNDUP READY 2 YIELD®, ROUNDUP READY 2 XTEND®, SEMETES AGROCERES™, SEMINIS™, SMARTSTAX®, STONEVILLE®, SYNGENTA®, TRUFLEX™, VT DOUBLE PRO®, VT TRIPLE PRO®, YIELDGARD®, YIELDGARD VT ROOTWORM/RR2®, YIELDGARD VT TRIPLE® and/or XTENDFLEX™ tradenames.

[1456] Compositions of the present disclosure may be applied to any part/portion of a plant. In some embodiments, the compositions are applied to plant propagation materials (e.g., cuttings, rhizomes, seeds and tubers). In some embodiments, the compositions are applied to the roots of a plant. In some embodiments, the compositions are applied to the foliage of a plant. In some embodiments, the compositions are applied to both the roots and the foliage of a plant. In some embodiments, the compositions are applied to plant propagation materials and to the plants that grow from said plant propagation materials.

[1457] Compositions of the present disclosure may be applied to any plant growth medium, including, but not limited to, soil.

[1458] Compositions of the present disclosure may be applied to plants, plant parts and/or plant growth media in any suitable manner, including, but not limited to, on-seed application, in-furrow application and foliar application.

[1459] Compositions of the present disclosure may be applied using any suitable method(s), including, but not limited to, coating, dripping, dusting, encapsulating, fogging, immersing, spraying, and soaking. Batch systems, in which predetermined batch sizes of material and composition are delivered into a mixer, may be employed. Continuous treatment systems, which are calibrated to apply composition at a predefined rate in proportion to a continuous flow of material, may also be employed. In some embodiments, compositions of the present disclosure are applied using a boom sprayer or an orchard sprayer.

[1460] In some embodiments, compositions of the present disclosure are applied directly to plant propagation material (e.g., seeds). According to some embodiments, plant propagation materials are soaked in a composition of the present disclosure for at least 0.1, 0.2, 0.3, 0.4, 0.5, 0.6, 0.7, 0.8, 0.9, 1, 1.25, 1.5, 1.75, 2, 3, 4, 5, 6, 9, 12, 15, 18, 21, 24, 36, 48 hours. According to some embodiments, plant propagation materials are coated with the compositions. Plant propagation materials may be coated with one or more additional layers (e.g., one or more protective layers that serve to enhance the stability and/or activity of an enzyme/organism of the present disclosure and/or one or more sequestration layers comprising substances that may reduce the stability and/or activity of an enzyme/organism of the present disclosure if included in the same layer as the enzyme/organism of the present disclosure). In some embodiments, the coating comprises, consists essentially of, or consists of a composition of the present disclosure and a drying powder.

[1461] In some embodiments, compositions of the present disclosure are applied directly to a plant growth medium (e.g., a soil). According to some embodiments, the compositions are applied in the vicinity of a plant propagation material (e.g., a seed). According to some embodiments, the compositions are applied to the root zone of a plant.

[1462] According to some embodiments, the compositions are applied using a drip irrigation system.

[1463] In some embodiments, compositions of the present disclosure are applied directly to plants. According to some embodiments, the compositions are fogged, misted, sprayed and/or sprinkled onto the plant(s) to be treated (e.g., foliar sprays).

[1464] In some embodiments, compositions of the present disclosure are applied to harvested plants and/or plant parts.

[1465] Individual components of the compositions (e.g., proteins of the present disclosure and chemical pesticides) may be separately or together. For example, in some embodiments, compositions of the present disclosure may be incorporated into integrated pest management strategies (e.g., a formulation comprising one or more proteins of the present disclosure may be applied to an orchard/vineyard as part of an integrated pest management strategy that includes separate applications of 2, 3, 4, 5 or more distinct pesticides in a rotation designed to reduce/prevent chemical pesticide-induced phytotoxicity and/or pest resistance).

[1466] In some embodiments, compositions of the present disclosure are freeze- spray- or spray-freeze-dried and then applied to plants/plant parts. For examples, in some embodiments, a formulation comprising and enzyme/organism of the present disclosure and one or more stabilizing components (e.g., one or more maltodextrins having a DEV of about 15 to about 20) is freeze- spray- or spray-freeze-dried, mixed with a drying powder (e.g., a drying powder comprising calcium stearate, attapulgite clay, montmorillonite clay, graphite, magnesium stearate, silica (e.g., fumed silica, hydrophobically-coated silica and/or precipitated silica) and/or talc), then coated on seed that was been pre-treated with one or more adhesives (e.g., an adhesive composition comprising one or more maltodextrins, one or more mono-, di- or oligosaccharides, one or more peptones, etc.), one or more pesticides and/or one or more plant signal molecules (e.g., one or more LCOs).

[1467] Compositions of the present disclosure may be applied to plants, plant parts and/or plant growth media in any suitable amount(s)/concentration(s).

[1468] Compositions of the present disclosure may be used to prevent and/or treat infestations/infections of/by horticultural pests at any time, including, prior to planting, at the time of planting, after planting, prior to germination, after germination, prior to seedling emergence, at the time of seedling emergence, after seedling emergence, prior to the vegetative stage, during the vegetative stage, after the vegetative stage, prior to the reproductive stage, during the reproductive stage, after the reproductive stage, prior to flowering, at the time of flowering, after flowering, prior to fruiting, at the time of fruiting, after fruiting, prior to ripening, at the time of ripening, after ripening, prior to harvest, at the time of harvest, and after harvesting. Indeed, compositions of the present disclosure may be used to extend the shelf-life of harvested products by preventing, treating, suppressing, eliminating and/or reducing the severity of infestations/infections of/by acarids, bacteria, fungi, insects, oomycetes and protozoa for many weeks/months post-harvest.

[1469] Compositions of the present disclosure may be applied to plants, plant parts and/or plant growth media at any time, including, but not limited to, prior to planting, at the time of planting, after planting, prior to germination, at the time of germination, after germination, prior to seedling emergence, at the time of seedling emergence, after seedling emergence, prior to the vegetative stage, during the vegetative stage, after the vegetative stage, prior to the reproductive stage, during the reproductive stage, after the reproductive stage, prior to flowering, at the time of flowering, after flowering, prior to fruiting, at the time of fruiting, after fruiting, prior to ripening, at the time of ripening, after ripening, prior to harvest, at the time of harvest, and after harvesting.

[1470] In some embodiments, compositions of the present disclosure are applied to plant propagation materials (e.g., seeds) about/at least 1, 2, 3, 4, 5, 6, 7, 8, 9, 10, 11, 12, 13, 14, 15, 16, 17, 18, 19, 20, 21, 22, 23, 24, 28, 32, 36, 40, 44, 48, 52, 56, 60, 64, 68, 72, 76, 80, 84, 88, 92, 96, 100, 104 weeks prior to planting.

[1471] In some embodiments, compositions of the present disclosure are applied to plant propagation materials (e.g., seeds) at the time of planting.

[1472] In some embodiments, compositions of the present disclosure are applied to plant propagation materials (e.g., seeds) after planting but before germination.

[1473] In some embodiments, compositions of the present disclosure are applied to plants following emergence.

[1474] In some embodiments, compositions of the present disclosure are applied to a plant or plant part pre-harvest (i.e., within 1, 2, 3, 4, 5, 6, 7, 8, 9, 10, 11, 12, 13, 14, 15 or more days before the plant or plant part is (to be) harvested).

[1475] In some embodiments, compositions of the present disclosure are applied to a plant or plant part post-harvest (i.e., after the plant or plant part has been harvested).

[1476] In some embodiments, compositions of the present disclosure are applied to a processed plant product.

[1477] In some embodiments, compositions of the present disclosure are applied to a harvest plant or plant part at a processing/shipping facility.

[1478] In some embodiments, compositions of the present disclosure are applied to a processed plant product.

[1479] The present disclosure thus extends to plants and plant parts that have been treated with a composition of the present disclosure (e.g., plant propagation materials coated with a formulation comprising one or more enzymes of the present disclosure, plants sprayed with a formulation comprising one or more enzymes of the present disclosure, harvested plant parts coated with a formulation comprising one or more enzymes of the present disclosure), to plants grown from plant propagation materials that were treated with a composition of the present disclosure, to plant parts harvested from plants that have been treated with a composition of the present disclosure, to plant parts harvested from plants grown from plant propagation materials that were treated with a composition of the present disclosure, to crops comprising a plurality of plants that were treated with a composition of the present disclosure, to crops comprising a plurality of plants grown from plant propagation materials that were treated with a composition of the present disclosure, to crops treated with a composition of the present disclosure, to processed products derived from plants that were treated with a composition of the present disclosure, to processed products derived from plants grown from plant parts that were treated with a composition of the present disclosure, and to processed products treated with a composition of the present disclosure.

[1480] As noted above, proteins of the present disclosure may be formulated into compositions comprising a variety of components, such as adhesives (stickers), chemical actives, dispersants (spreaders), drying agents, emulsifiers, microbes, nutrients, pest attractants and feeding stimulants, pH control components, postharvest treatments, rain fasteners, rhealogical agents, safeners, stabilizers, UV protectants and wetting agents. It is to be understood that compositions and methods of the present disclosure may likewise be used in combination with such components as separate and distinct compositions (as part of an integrated pest management strategy, for example).

[1481] It is to be understood that compositions and methods of the present disclosure are not limited to horticultural uses. The same activities that make enzymes, formulations, nucleic acids and organisms of the present disclosure useful for preventing, treating, suppressing, eliminating and/or reducing the severity of infestations/infections of/by horticultural pests likewise render them useful for preventing, treating, suppressing, eliminating and/or reducing the severity of infestations/infections of/by bacteria, fungi, insects and oomycetes in and on various media, such as food storage containers, animal bedding/feed, clothing, hard surfaces, medical instruments, etc. Thus, it is to be understood that compositions and methods of the present disclosure may be modified for use in any other industry or endeavor in which such prevention, treatment, suppression, elimination and/or reduction in disease severity may be of benefit.

[1482] The following is a non-exhaustive listing of concepts and embodiments encompassed by the present disclosure:

[1483] Use of a protein or formulation of the present disclosure for any one, two, three, four, five, six, seven, eight, nine, ten or more of the following:
[1484] 1) preventing/treating/suppressing/eliminating an infestation/infection of a plant or plant part by a horticultural pest
[1485] 2) preventing/treating/suppressing/eliminating an infestation/infection of a plant or plant part by an acarid
[1486] 3) preventing/treating/suppressing/eliminating an infestation/infection of a plant or plant part by a bacterium
[1487] 4) preventing/treating/suppressing/eliminating an infestation/infection of a plant or plant part by a fungus
[1488] 5) preventing/treating/suppressing/eliminating an infestation/infection of a plant or plant part by a gastropod
[1489] 6) preventing/treating/suppressing/eliminating an infestation/infection of a plant or plant part by an insect
[1490] 7) preventing/treating/suppressing/eliminating an infestation/infection of a plant or plant part by a nematode
[1491] 8) preventing/treating/suppressing/eliminating an infestation/infection of a plant or plant part by an oomycete
[1492] 9) preventing/treating/suppressing/eliminating an infestation/infection of a plant or plant part by a protozoan
[1493] 10) reducing disease severity in plants affected by one or more horticultural pests
[1494] 11) reducing disease severity in plants affected by a phytopathogenic acarid
[1495] 12) reducing disease severity in plants affected by a phytopathogenic bacteria
[1496] 13) reducing disease severity in plants affected by a phytopathogenic fungus
[1497] 14) reducing disease severity in plants affected by a phytopathogenic gastropod
[1498] 15) reducing disease severity in plants affected by a phytopathogenic insect
[1499] 16) reducing disease severity in plants affected by a phytopathogenic nematode
[1500] 17) reducing disease severity in plants affected by a phytopathogenic oomycete
[1501] 18) reducing disease severity in plants affected by a phytopathogenic protozoa
[1502] 19) treating a surface/substance that is susceptible to infestation/infection by a horticultural pest
[1503] 20) treating a surface/substance that is susceptible to infestation/infection by an acarid
[1504] 21) treating a surface/substance that is susceptible to infestation/infection by a bacterium
[1505] 22) treating a surface/substance that is susceptible to infestation/infection by a fungus
[1506] 23) treating a surface/substance that is susceptible to infestation/infection by a gastropod
[1507] 24) treating a surface/substance that is susceptible to infestation/infection by an insect
[1508] 25) treating a surface/substance that is susceptible to infestation/infection by a nematode
[1509] 26) treating a surface/substance that is susceptible to infestation/infection by an oomycete
[1510] 27) treating a surface/substance that is susceptible to infestation/infection by a protozoan
[1511] 28) preventing/treating/suppressing/eliminating an infestation/infection of a container, such as a seed container, a planting pot, a hydroponic growth system, an experimental growth chamber, a greenhouse, a postharvest storage container, a postharvest treatment chamber or a postharvest shipping container, by a horticultural pest
[1512] 29) preventing/treating/suppressing/eliminating an infestation/infection of a container, such as a seed container, a planting pot, a hydroponic growth system, an experimental growth chamber, a greenhouse, a postharvest storage container, a postharvest treatment chamber or a postharvest shipping container, by an acarid
[1513] 30) preventing/treating/suppressing/eliminating an infestation/infection of a container, such as a seed container, a planting pot, a hydroponic growth system, an experimental growth chamber, a greenhouse, a postharvest storage container, a postharvest treatment chamber or a postharvest shipping container, by a bacterium
[1514] 31) preventing/treating/suppressing/eliminating an infestation/infection of a container, such as a seed container, a planting pot, a hydroponic growth system, an experimental growth chamber, a greenhouse, a postharvest storage container, a postharvest treatment chamber or a postharvest shipping container, by a fungus
[1515] 32) preventing/treating/suppressing/eliminating an infestation/infection of a container, such as a seed container, a planting pot, a hydroponic growth system, an experimental growth chamber, a greenhouse, a postharvest storage container, a postharvest treatment chamber or a postharvest shipping container, by a gastropod
[1516] 33) preventing/treating/suppressing/eliminating an infestation/infection of a container, such as a seed container, a planting pot, a hydroponic growth system, an experimental growth chamber, a greenhouse, a postharvest storage container, a postharvest treatment chamber or a postharvest shipping container, by an insect
[1517] 34) preventing/treating/suppressing/eliminating an infestation/infection of a container, such as a seed container, a planting pot, a hydroponic growth system, an experimental growth chamber, a greenhouse, a postharvest storage container, a postharvest treatment chamber or a postharvest shipping container, by a nematode
[1518] 35) preventing/treating/suppressing/eliminating an infestation/infection of a container, such as a seed container, a planting pot, a hydroponic growth system, an experimental growth chamber, a greenhouse, a postharvest storage container, a postharvest treatment chamber or a postharvest shipping container, by an oomycete
[1519] 36) preventing/treating/suppressing/eliminating an infestation/infection of a container, such as a seed container, a planting pot, a hydroponic growth system, an experimental growth chamber, a greenhouse, a postharvest storage container, a postharvest treatment chamber or a postharvest shipping container, by a protozoan
[1520] 37) treating (e.g., coating, dipping, drenching, fogging, misting, soaking, spraying) a plant or plant part
[1521] 38) treating (e.g., drenching, fogging, irrigating, misting, spraying) a plant growth medium
[1522] 39) treating a planting/irrigation/fertilization/harvesting/packing/storage apparatus
[1523] 40) treating (e.g., coating, dipping, drenching, fogging, misting, soaking, spraying) a storage container prior to/concurrently with/subsequent to introduction of a plant or plant part into said storage container
[1524] 41) treating (e.g., coating, dipping, drenching, fogging, misting, soaking, spraying) a harvested plant or plant part
[1525] 42) prolonging the shelf-life of a harvested plant or plant part
[1526] 43) delaying the ripening of a harvested plant or plant part
[1527] 44) hastening the ripening of a harvested plant or plant part
[1528] 45) improving the efficacy of a chemical pesticide
[1529] 46) improving the efficacy of a chemical acaricide
[1530] 47) improving the efficacy of a chemical bactericide
[1531] 48) improving the efficacy of a chemical fungicide
[1532] 49) improving the efficacy of a chemical gastropodicide
[1533] 50) improving the efficacy of a chemical herbicide
[1534] 51) improving the efficacy of a chemical insecticide
[1535] 52) improving the efficacy of a chemical nematicide
[1536] 53) improving the efficacy of a chemical oomyceticide
[1537] 54) improving the efficacy of a chemical protozoacide
[1538] 55) improving the efficacy of a biological pesticide
[1539] 56) improving the efficacy of a biological acaricide
[1540] 57) improving the efficacy of a biological bactericide
[1541] 58) improving the efficacy of a biological fungicide
[1542] 59) improving the efficacy of a biological gastropodicide
[1543] 60) improving the efficacy of a biological herbicide
[1544] 61) improving the efficacy of a biological insecticide
[1545] 62) improving the efficacy of a biological nematicide
[1546] 63) improving the efficacy of a biological oomyceticide
[1547] 64) improving the efficacy of a biological protozoacide
[1548] 65) improving the efficacy of a preharvest treatment
[1549] 66) improving the efficacy of a postharvest treatment
[1550] 67) expanding the target spectrum of a chemical pesticide
[1551] 68) expanding the target spectrum of a chemical acaricide
[1552] 69) expanding the target spectrum of a chemical bactericide
[1553] 70) expanding the target spectrum of a chemical fungicide
[1554] 71) expanding the target spectrum of a chemical gastropodicide
[1555] 72) expanding the target spectrum of a chemical herbicide
[1556] 73) expanding the target spectrum of a chemical insecticide
[1557] 74) expanding the target spectrum of a chemical nematicide
[1558] 75) expanding the target spectrum of a chemical oomyceticide
[1559] 76) expanding the target spectrum of a chemical protozoacide
[1560] 77) expanding the target spectrum of a biological pesticide
[1561] 78) expanding the target spectrum of a biological acaricide
[1562] 79) expanding the target spectrum of a biological bactericide
[1563] 80) expanding the target spectrum of a biological fungicide
[1564] 81) expanding the target spectrum of a biological gastropodicide
[1565] 82) expanding the target spectrum of a biological herbicide
[1566] 83) expanding the target spectrum of a biological insecticide
[1567] 84) expanding the target spectrum of a biological nematicide
[1568] 85) expanding the target spectrum of a biological oomyceticide
[1569] 86) expanding the target spectrum of a biological protozoacide
[1570] 87) expanding the target spectrum of a preharvest treatment
[1571] 88) expanding the target spectrum of a postharvest treatment
[1572] 89) reducing chemical pesticide-induced pest resistance and/or phytotoxicity
[1573] 90) reducing biological pesticide-induced pest resistance and/or phytotoxicity
[1574] 91) inclusion as part of an integrated pest management strategy.

[1575] Any of the foregoing uses in which any one, two, three, four, five, six, seven, eight, nine, ten or more of the following is true:
[1576] 1) the protein is an enzyme
[1577] 2) the protein is an enzyme belonging to EC 1
[1578] 3) the protein is an enzyme belonging to EC 1.1
[1579] 4) the protein is an enzyme belonging to EC 1.1.3
[1580] 5) the protein is an enzyme belonging to EC 1.1.3.4
[1581] 6) the protein is an enzyme belonging to EC 1.1.3.25
[1582] 7) the protein is an enzyme belonging to EC 1.10
[1583] 8) the protein is an enzyme belonging to EC 1.10.3
[1584] 9) the protein is an enzyme belonging to EC 1.10.3.2
[1585] 10) the protein is an enzyme belonging to EC 1.11
[1586] 11) the protein is an enzyme belonging to EC 1.11.1
[1587] 12) the protein is an enzyme belonging to EC 1.11.1.6
[1588] 13) the protein is an enzyme belonging to EC 1.11.1.7
[1589] 14) the protein is an enzyme belonging to EC 1.14
[1590] 15) the protein is an enzyme belonging to EC 1.14.99
[1591] 16) the protein is an enzyme belonging to EC 1.14.99.56
[1592] 17) the protein is an enzyme belonging to EC 3
[1593] 18) the protein is an enzyme belonging to EC 3.1
[1594] 19) the protein is an enzyme belonging to EC 3.1.1
[1595] 20) the protein is an enzyme belonging to EC 3.1.1.3
[1596] 21) the protein is an enzyme belonging to EC 3.1.1.5
[1597] 22) the protein is an enzyme belonging to EC 3.1.1.11
[1598] 23) the protein is an enzyme belonging to EC 3.1.1.32
[1599] 24) the protein is an enzyme belonging to EC 3.1.4
[1600] 25) the protein is an enzyme belonging to EC 3.1.4.3
[1601] 26) the protein is an enzyme belonging to EC 3.1.4.11
[1602] 27) the protein is an enzyme belonging to EC 3.2
[1603] 28) the protein is an enzyme belonging to EC 3.2.1
[1604] 29) the protein is an enzyme belonging to EC 3.2.1.1
[1605] 30) the protein is an enzyme belonging to EC 3.2.1.3
[1606] 31) the protein is an enzyme belonging to EC 3.2.1.4
[1607] 32) the protein is an enzyme belonging to EC 3.2.1.5
[1608] 33) the protein is an enzyme belonging to EC 3.2.1.6
[1609] 34) the protein is an enzyme belonging to EC 3.2.1.7
[1610] 35) the protein is an enzyme belonging to EC 3.2.1.8
[1611] 36) the protein is an enzyme belonging to EC 3.2.1.11
[1612] 37) the protein is an enzyme belonging to EC 3.2.1.14
[1613] 38) the protein is an enzyme belonging to EC 3.2.1.15
[1614] 39) the protein is an enzyme belonging to EC 3.2.1.17
[1615] 40) the protein is an enzyme belonging to EC 3.2.1.21
[1616] 41) the protein is an enzyme belonging to EC 3.2.1.37
[1617] 42) the protein is an enzyme belonging to EC 3.2.1.39
[1618] 43) the protein is an enzyme belonging to EC 3.2.1.41
[1619] 44) the protein is an enzyme belonging to EC 3.2.1.55
[1620] 45) the protein is an enzyme belonging to EC 3.2.1.58
[1621] 46) the protein is an enzyme belonging to EC 3.2.1.59
[1622] 47) the protein is an enzyme belonging to EC 3.2.1.73
[1623] 48) the protein is an enzyme belonging to EC 3.2.1.75
[1624] 49) the protein is an enzyme belonging to EC 3.2.1.78
[1625] 50) the protein is an enzyme belonging to EC 3.2.1.91
[1626] 51) the protein is an enzyme belonging to EC 3.2.1.101
[1627] 52) the protein is an enzyme belonging to EC 3.2.1.109
[1628] 53) the protein is an enzyme belonging to EC 3.2.1.132
[1629] 54) the protein is an enzyme belonging to EC 3.2.1.133
[1630] 55) the protein is an enzyme belonging to EC 3.2.1.176
[1631] 56) the protein is an enzyme belonging to EC 3.4
[1632] 57) the protein is an enzyme belonging to EC 3.4.11
[1633] 58) the protein is an enzyme belonging to EC 3.4.11.1
[1634] 59) the protein is an enzyme belonging to EC 3.4.21
[1635] 60) the protein is an enzyme belonging to EC 3.4.21.19
[1636] 61) the protein is an enzyme belonging to EC 3.4.21.62
[1637] 62) the protein is an enzyme belonging to EC 3.4.24
[1638] 63) the protein is an enzyme belonging to EC 3.4.24.28
[1639] 64) the protein is an enzyme belonging to EC 3.5
[1640] 65) the protein is an enzyme belonging to EC 3.5.1
[1641] 66) the protein is an enzyme belonging to EC 3.5.1.1
[1642] 67) the protein is an enzyme belonging to EC 4
[1643] 68) the protein is an enzyme belonging to EC 4.2
[1644] 69) the protein is an enzyme belonging to EC 4.2.2
[1645] 70) the protein is an enzyme belonging to EC 4.2.2.2
[1646] 71) the protein comprises one or more polypeptides having about/at least 60, 61, 62, 63, 64, 65, 66, 67, 68, 69, 70, 71, 72, 73, 74, 75, 76, 77, 78, 79, 80, 81, 82, 83, 84, 85, 86, 87, 88, 89, 90, 91, 92, 93, 94, 95, 96, 97, 98, 99 or 100% sequence identity to one or more of SEQ ID NOs: 1-48 and 98-150 or a mature polypeptide thereof
[1647] 72) the protein comprises one or more polypeptides encoded by a polynucleotide having about/at least 60, 61, 62, 63, 64, 65, 66, 67, 68, 69, 70, 71, 72, 73, 74, 75, 76, 77, 78, 79, 80, 81, 82, 83, 84, 85, 86, 87, 88, 89, 90, 91, 92, 93, 94, 95, 96, 97, 98, 99 or 100% sequence identity to any one or more of SEQ ID NOs: 49-97 and 151-203 or the cDNA sequence thereof
[1648] 73) the protein comprises one or more polypeptides derived from any one of SEQ ID NOs: 1-48 and 98-150 by substitution, deletion or insertion of one or more amino acids
[1649] 74) the protein comprises one or more polypeptides derived from a mature polypeptide of any one of SEQ ID NOs: 1-48 and 98-150 by substitution, deletion or insertion of one or more amino acids
[1650] 75) the protein comprises one or more polypeptides derived from any one of 71) through 74) wherein the N- and/or C-terminal end has been extended by the addition of one or more amino acids
[1651] 76) the protein comprises a fragment of any one of 71) through 75)
[1652] 77) the protein is an enzymatically active fragment/mutant/variant of any one of SEQ ID NOs: 1-48 and 98-150 or a mature polypeptide thereof
[1653] 78) the formulation comprises 2, 3, 4, 5, 6, 7, 8, 9, 10 or more proteins of the present disclosure or enzymatically active fragments/mutations/variants thereof
[1654] 79) the formulation comprises one or more adhesives
[1655] 80) the formulation comprises one or more pest attractants
[1656] 81) the formulation comprises one or more pest feeding stimulants
[1657] 82) the formulation comprises one or more chemical pesticides
[1658] 83) the formulation comprises one or more chemical acaricides
[1659] 84) the formulation comprises one or more chemical bactericides
[1660] 85) the formulation comprises one or more chemical fungicides
[1661] 86) the formulation comprises one or more chemical gastropodicides
[1662] 87) the formulation comprises one or more chemical herbicides
[1663] 88) the formulation comprises one or more chemical insecticides
[1664] 89) the formulation comprises one or more chemical nematicides
[1665] 90) the formulation comprises one or more chemical oomyceticides
[1666] 91) the formulation comprises one or more chemical protozoacides
[1667] 92) the formulation comprises one or more biological pesticides
[1668] 93) the formulation comprises one or more biological acaricides
[1669] 94) the formulation comprises one or more biological bactericides
[1670] 95) the formulation comprises one or more biological fungicides
[1671] 96) the formulation comprises one or more biological gastropodicides
[1672] 97) the formulation comprises one or more biological herbicides
[1673] 98) the formulation comprises one or more biological insecticides
[1674] 99) the formulation comprises one or more biological nematicides
[1675] 100) the formulation comprises one or more biological oomyceticides
[1676] 101) the formulation comprises one or more biological protozoacides
[1677] 102) the formulation comprises one or more dispersants
[1678] 103) the formulation comprises one or more polyols
[1679] 104) the formulation comprises glycerol
[1680] 105) the formulation comprises sorbitol
[1681] 106) the formulation comprises one or more pH control components
[1682] 107) the formulation comprises an acetate buffer
[1683] 108) the formulation comprises a sodium acetate buffer
[1684] 109) the formulation comprises a carbonate buffer
[1685] 110) the formulation comprises a sodium carbonate buffer
[1686] 111) the formulation comprises a citrate buffer
[1687] 112) the formulation comprises a sodium citrate buffer
[1688] 113) the formulation comprises a phosphate buffer
[1689] 114) the formulation comprises a potassium phosphate buffer
[1690] 115) the formulation has a pH of about 3 to about 7
[1691] 116) the formulation has a pH of about 3 to about 6
[1692] 117) the formulation has a pH of about 3 to about 5
[1693] 118) the formulation has a pH of about 4 to about 5
[1694] 119) the formulation has a pH of less than 5
[1695] 120) the formulation has a pH of more than 5
[1696] 121) the formulation has a pH of about 5 to about 6
[1697] 122) the formulation has a pH of about 5 to about 7.5
[1698] 123) the formulation has a pH of less than 6
[1699] 124) the formulation has a pH of more than 6
[1700] 125) the formulation has a pH of about 6 to about 7
[1701] 126) the formulation has a pH of less than 6.5
[1702] 127) the formulation has a pH of more than 6.5
[1703] 128) the formulation has a pH of less than 7
[1704] 129) the formulation has a pH of more than 7
[1705] 130) the formulation has a pH of about 6 to about 7.5
[1706] 131) the formulation has a pH of more than 7.5
[1707] 132) the formulation has a pH of about 7.5 to about 10
[1708] 133) the formulation has a pH of about 8 to about 10
[1709] 134) the formulation has a pH of about 8.5 to about 9.5
[1710] 135) the formulation comprises one or more rain fasteners
[1711] 136) the formulation comprises one or more organo-modified siloxanes
[1712] 137) the formulation comprises one or more organo-modified trisiloxanes
[1713] 138) the formulation comprises one or more polyether trisiloxanes
[1714] 139) the formulation comprises one or more organo-modified polysiloxanes
[1715] 140) the formulation comprises one or more polyether polysiloxanes
[1716] 141) the formulation comprises one or more preservatives
[1717] 142) the formulation comprises potassium benzoate
[1718] 143) the formulation comprises potassium sorbate
[1719] 144) the formulation comprises sodium benzoate
[1720] 145) the formulation comprises sodium sorbate
[1721] 146) the formulation comprises one or more postharvest treatments
[1722] 147) the formulation comprises one or more essential oils
[1723] 148) the formulation comprises one or more ethylene biosynthesis inhibitors
[1724] 149) the formulation comprises one or more cyclopropenes
[1725] 150) the formulation comprises one or more waxes
[1726] 151) the protein or formulation is applied in a pesticidally effective amount
[1727] 152) the protein or formulation is applied in an acaricidally effective amount
[1728] 153) the protein or formulation is applied in a bactericidally effective amount
[1729] 154) the protein or formulation is applied in a fungicidally effective amount
[1730] 155) the protein or formulation is applied in a gastropodicidally effective amount
[1731] 156) the protein or formulation is applied in an herbicidally effective amount
[1732] 157) the protein or formulation is applied in an insecticidally effective amount
[1733] 158) the protein or formulation is applied in a nematicidally effective amount
[1734] 159) the protein or formulation is applied in an oomyceticidally effective amount
[1735] 160) the protein or formulation is applied in a protozoacidally effective amount
[1736] 161) the protein or formulation is applied in a pesticidally ineffective amount (e.g., as an adjuvant)
[1737] 162) the protein or formulation is applied in an acaricidally ineffective amount (e.g., as an adjuvant)
[1738] 163) the protein or formulation is applied in a bactericidally ineffective amount (e.g., as an adjuvant)
[1739] 164) the protein or formulation is applied in a fungicidally ineffective amount (e.g., as an adjuvant)
[1740] 165) the protein or formulation is applied in a gastropodicidally ineffective amount (e.g., as an adjuvant)
[1741] 166) the protein or formulation is applied in a herbicidially ineffective amount (e.g., as an adjuvant)
[1742] 167) the protein or formulation is applied in an insecticidally ineffective amount (e.g., as an adjuvant)
[1743] 168) the protein or formulation is applied in a nematicidally ineffective amount (e.g., as an adjuvant)
[1744] 169) the protein or formulation is applied in an oomyceticidally ineffective amount (e.g., as an adjuvant)
[1745] 170) the protein or formulation is applied in a protozoacidally ineffective amount (e.g., as an adjuvant)
[1746] 171) the protein or formulation is used in combination with one or more adhesives (e.g., in a tank mix)
[1747] 172) the protein or formulation is used in combination with one or more pest attractants (e.g., in a tank mix)
[1748] 173) the protein or formulation is used in combination with one or more pest feeding stimulants (e.g., in a tank mix)
[1749] 174) the protein or formulation is used in combination with one or more chemical pesticides (e.g., in a tank mix)
[1750] 175) the protein or formulation is used in combination with one or more chemical acaricides (e.g., in a tank mix)
[1751] 176) the protein or formulation is used in combination with one or more chemical bactericides (e.g., in a tank mix)
[1752] 177) the protein or formulation is used in combination with one or more chemical fungicides (e.g., in a tank mix)
[1753] 178) the protein or formulation is used in combination with one or more chemical gastropodicides (e.g., in a tank mix)
[1754] 179) the protein or formulation is used in combination with one or more chemical herbicides (e.g., in a tank mix)
[1755] 180) the protein or formulation is used in combination with one or more chemical insecticides (e.g., in a tank mix)
[1756] 181) the protein or formulation is used in combination with one or more chemical nematicides (e.g., in a tank mix)
[1757] 182) the protein or formulation is used in combination with one or more chemical oomyceticides (e.g., in a tank mix)
[1758] 183) the protein or formulation is used in combination with one or more chemical protozoacides (e.g., in a tank mix)
[1759] 184) the protein or formulation is used in combination with one or more microbial pesticides (e.g., in a tank mix)
[1760] 185) the protein or formulation is used in combination with one or more microbial acaricides (e.g., in a tank mix)
[1761] 186) the protein or formulation is used in combination with one or more microbial bactericides (e.g., in a tank mix)
[1762] 187) the protein or formulation is used in combination with one or more microbial fungicides (e.g., in a tank mix)
[1763] 188) the protein or formulation is used in combination with one or more microbial gastropodicides (e.g., in a tank mix)
[1764] 189) the protein or formulation is used in combination with one or more microbial herbicides (e.g., in a tank mix)
[1765] 190) the protein or formulation is used in combination with one or more microbial insecticides (e.g., in a tank mix)
[1766] 191) the protein or formulation is used in combination with one or more microbial nematicides (e.g., in a tank mix)
[1767] 192) the protein or formulation is used in combination with one or more microbial oomyceticides (e.g., in a tank mix)
[1768] 193) the protein or formulation is used in combination with one or more microbial protozoacides (e.g., in a tank mix)
[1769] 194) the protein or formulation is used in combination with one or more diazotrophs (e.g., in a tank mix)
[1770] 195) the protein or formulation is used in combination with one or more phosphate-solubilizing microorganisms (e.g., in a tank mix)
[1771] 196) the protein or formulation is used in combination with one or more plant growth regulators (e.g., in a tank mix)
[1772] 197) the protein or formulation is used in combination with one or more rain fasteners (e.g., in a tank mix)
[1773] 198) the protein or formulation is used in combination with one or more organo-modified siloxanes (e.g., in a tank mix)
[1774] 199) the protein or formulation is used in combination with one or more organo-modified trisiloxanes (e.g., in a tank mix)
[1775] 200) the protein or formulation is used in combination with one or more polyether trisiloxanes (e.g., in a tank mix)
[1776] 201) the protein or formulation is used in combination with one or more organo-modified polysiloxanes (e.g., in a tank mix)
[1777] 202) the protein or formulation is used in combination with one or more polyether polysiloxanes (e.g., in a tank mix)
[1778] 203) the protein or formulation is used in combination with one or more preservatives (e.g., in a tank mix)
[1779] 204) the protein or formulation is used in combination with one or more preharvest treatments (e.g., in a tank mix)
[1780] 205) the protein or formulation is used in combination with one or more postharvest treatments (e.g., in a tank mix)
[1781] 206) the protein or formulation is used in combination with one or more essential oils (e.g., in a tank mix)
[1782] 207) the protein or formulation is used in combination with one or more ethylene biosynthesis inhibitors (e.g., in a tank mix)
[1783] 208) the protein or formulation is used in combination with one or more cyclopropenes (e.g., in a tank mix)
[1784] 209) the protein or formulation is used in combination with one or more waxes (e.g., in a tank mix).

[1785] A transgenic microorganism, plant or plant part that:
[1786] 1) comprises one or more polynucleotides encoding a polypeptide having about/at least 60, 61, 62, 63, 64, 65, 66, 67, 68, 69, 70, 71, 72, 73, 74, 75, 76, 77, 78, 79, 80, 81, 82, 83, 84, 85, 86, 87, 88, 89, 90, 91, 92, 93, 94, 95, 96, 97, 98, 99 or 100% sequence identity to one or more of SEQ ID NOs: 1-48 and 98-150 or a mature polypeptide thereof
[1787] 2) comprises one or more polynucleotides having about/at least 60, 61, 62, 63, 64, 65, 66, 67, 68, 69, 70, 71, 72, 73, 74, 75, 76, 77, 78, 79, 80, 81, 82, 83, 84, 85, 86, 87, 88, 89, 90, 91, 92, 93, 94, 95, 96, 97, 98, 99 or 100% sequence identity to any one or more of SEQ ID NOs: 49-97 and 151-203 or the cDNA sequence thereof
[1788] 3) expresses one or more polypeptides having about/at least 60, 61, 62, 63, 64, 65, 66, 67, 68, 69, 70, 71, 72, 73, 74, 75, 76, 77, 78, 79, 80, 81, 82, 83, 84, 85, 86, 87, 88, 89, 90, 91, 92, 93, 94, 95, 96, 97, 98, 99 or 100% sequence identity to one or more of SEQ ID NOs: 1-48 and 98-150 or a mature polypeptide thereof
[1789] 4) comprises one or more polynucleotides encoding a polypeptide derived from any one of SEQ ID NOs: 1-48 and 98-150 by substitution, deletion or insertion of one or more amino acids
[1790] 5) expresses one or more polypeptides derived from any one of SEQ ID NOs: 1-48 and 98-150 by substitution, deletion or insertion of one or more amino acids
[1791] 6) comprises one or more polynucleotides encoding a polypeptide derived from a mature polypeptide of any one of SEQ ID NOs: 1-48 and 98-150 by substitution, deletion or insertion of one or more amino acids
[1792] 7) expresses one or more polypeptides derived from a mature polypeptide of any one of SEQ ID NOs: 1-48 and 98-150 by substitution, deletion or insertion of one or more amino acids
[1793] 8) comprises one or more polynucleotides encoding a polypeptide derived from any one of any one of 71) through 74) above wherein the N- and/or C-terminal end has been extended by the addition of one or more amino acids
[1794] 9) expresses one or more polypeptides derived from any one of 71) through 74) above wherein the N- and/or C-terminal end has been extended by the addition of one or more amino acids
[1795] 10) comprises one or more polynucleotides encoding an enzymatically active fragment of any one of 71) through 77) above
[1796] 11) expresses an enzymatically active fragment of any one of 71) through 77) above.

[1797] Use of a rain fastener for any one, two, three, four, five, six, seven, eight, nine, ten or more of the following:
[1798] 1) improving the adhesion/spreading/rainfastness of a protein on a surface/substance that is susceptible to infestation/infection by a horticultural pest
[1799] 2) improving the adhesion/spreading/rainfastness of a protein on a surface/substance that is susceptible to infestation/infection by an acarid
[1800] 3) improving the adhesion/spreading/rainfastness of a protein on a surface/substance that is susceptible to infestation/infection by a bacterium
[1801] 4) improving the adhesion/spreading/rainfastness of a protein on a surface/substance that is susceptible to infestation/infection by a fungus
[1802] 5) improving the adhesion/spreading/rainfastness of a protein on a surface/substance that is susceptible to infestation/infection by a gastropod
[1803] 6) improving the adhesion/spreading/rainfastness of a protein on a surface/substance that is susceptible to infestation/infection by an insect
[1804] 7) improving the adhesion/spreading/rainfastness of a protein on a surface/substance that is susceptible to infestation/infection by a nematode
[1805] 8) improving the adhesion/spreading/rainfastness of a protein on a surface/substance that is susceptible to infestation/infection by an oomycete
[1806] 9) improving the adhesion/spreading/rainfastness of a protein on a surface/substance that is susceptible to infestation/infection by a protozoan
[1807] 10) improving the adhesion/spreading/rainfastness of a protein on a container, such as a seed container, a planting pot, a hydroponic growth system, an experimental growth chamber, a greenhouse, a postharvest storage container, a postharvest treatment chamber or a postharvest shipping container
[1808] 11) improving the adhesion/spreading/rainfastness of a protein on a plant or plant part
[1809] 12) improving the adhesion/spreading/rainfastness of a protein on a harvested plant or plant part
[1810] 13) improving the pesticidal efficacy of a protein or formulation of the present disclosure
[1811] 14) improving the acaricidal efficacy of a protein or formulation of the present disclosure
[1812] 15) improving the bactericidal efficacy of a protein or formulation of the present disclosure
[1813] 16) improving the fungicidal efficacy of a protein or formulation of the present disclosure
[1814] 17) improving the gastropodicidal efficacy of a protein or formulation of the present disclosure
[1815] 18) improving the herbicidal efficacy of a protein or formulation of the present disclosure
[1816] 19) improving the insecticidal efficacy of a protein or formulation of the present disclosure
[1817] 20) improving the nematicidal efficacy of a protein or formulation of the present disclosure
[1818] 21) improving the oomyceticidal efficacy of a protein or formulation of the present disclosure
[1819] 22) improving the protozoacidal efficacy of a protein or formulation of the present disclosure.

[1820] Any of the foregoing uses in which any one, two, three, four, five, six, seven, eight, nine, ten or more of the following is true:
[1821] 1) the rain fastener comprises one or more organo-modified siloxanes
[1822] 2) the rain fastener comprises one or more organo-modified trisiloxanes
[1823] 3) the rain fastener comprises one or more polyether trisiloxanes
[1824] 4) the rain fastener comprises one or more trisiloxane ethoxylates
[1825] 5) the rain fastener comprises one or more trisiloxane polyethoxylates
[1826] 6) the rain fastener comprises one or more organo-modified polysiloxanes
[1827] 7) the rain fastener comprises one or more polyether polysiloxanes
[1828] 8) the rain fastener comprises one or more polysiloxane ethoxylates
[1829] 9) the rain fastener comprises one or more polysiloxane polyethoxylates
[1830] 10) the rain fastener comprises one or more organo-modified siloxanes selected from the group consisting of trisiloxanes and polysiloxanes described by the general Formula I:

[chemical structure]

[1831] wherein
[1832] A is 0-200, preferably A is 0-1, more preferably A is 0;
[1833] B is 0-200, preferably B is 0.5-2; more preferably B is 1;

A+B>0;
[1834] R¹ represents identical or different from each other hydrocarbon substituents of 1-10 carbons or hydrogen, preferably methyl, ethyl, propyl and/or phenyl substituents, more preferably methyl substituents; and
[1835] R² represents identical or different from each other polyether substituents of the general Formula II:

[chemical structure]

[1836] wherein
[1837] R³ represents identical or different from each other hydrocarbon moieties of 1-8 carbons, which optionally is interrupted by oxygen atoms, preferably linear hydrocarbons of 2-4 carbons, more preferably —CH₂—CH₂—CH₂—;
[1838] R⁴ represents identical or different from each other hydrocarbon substituents of 1-12 carbons or hydrogen, preferably methyl, ethyl, phenyl and/or hydrogen substituents;
[1839] R⁵ represents identical or different from each other hydrocarbon substituents of 1-16 carbons, which optionally contains urethane, carbonyl or carboxylic acid functionality, or hydrogen; preferably methyl or hydrogen; more preferably hydrogen;
[1840] C is 0-60, preferably C is 1-15;
[1841] D is 0-60, preferably D is 0-10;
[1842] E is 0-20, preferably E is 0-10, more preferably E is 0; and

C+D+E>0
[1843] 11) the rain fastener comprises Oxirane, 2-methyl-, polymer with oxirane, mono[3-[1,3,3,3-tetramethyl-1-[(trimethylsilyl)oxy]-1-disiloxanyl]propyl] ether
[1844] 12) the rain fastener comprises 3-(2-methoxyethoxy)propyl-methyl-bis(trimethylsilyloxy)silane
[1845] 13) the rain fastener comprises polyalkyleneoxide silane and isotridecylalcohol ethoxylate
[1846] 14) the rain fastener comprises 3-(polyoxyethylene)propylheptamethyltrisiloxane
[1847] 15) the rain fastener comprises siloxane polyalkyleneoxide and fatty alcohol (C10-12) ethoxylate propoxylate
[1848] 16) the rain fastener comprises Oxirane, 2-methyl-, polymer with oxirane, mono[3-[1,3,3,3-tetramethyl-1-[(trimethylsilyl)oxy]-1-disiloxanyl]propyl] ether.

### EXAMPLES

[1849] The following examples are provided to illustrate certain embodiments and are not to be construed as limiting the inventive concepts described in the present disclosure.

### Examples 1-3: Ormano-modified Siloxanes Improve Enzyme Rainfastness on Plant Surfaces

### Commercial Adjuvants Tested:

[1850] BREAK-THRU® S 301: Oxirane, 2-methyl-, polymer with oxirane, mono[3-[1,3,3,3-tetramethyl-1-[(trimethylsilyl)oxy]-1-disiloxanyl]propyl] ether (Evonik Operations Gmbh, Essen, Germany)
[1851] SILWET® L-77: 3-(2-methoxyethoxy)propyl-methyl-bis(trimethylsilyloxy)silane (Momentive Inc, Waterford, NY, USA)
[1852] SILWET® HS-312: Polyalkyleneoxide silane and isotridecylalcohol ethoxylate (Momentive Inc, Waterford, NY, USA)
[1853] SILWET® 408: 3-(Polyoxyethylene)propylheptamethyltrisiloxane (Momentive Inc, Waterford, NY, USA)
[1854] SILWET® STIK 2: Siloxane polyalkyleneoxide and fatty alcohol (C10-12) ethoxylate propoxylate (Momentive Inc, Waterford, NY, USA)
[1855] SILWET® 719: Oxirane, 2-methyl-, polymer with oxirane, mono[3-[1,3,3,3-tetramethyl-1-[(trimethylsilyl)oxy]-1-disiloxanyl]propyl] ether (Momentive Inc, Waterford, NY, USA)
[1856] Tween® L-1010: Polyoxyethylene (10) polyoxypropylene (10) sorbitan monolaurate (Croda International Plc, East Yorkshire, United Kingdom)
[1857] Tween® 24: Polyoxyethlene (16) sorbitan monolaurate (Croda International Plc, East Yorkshire, United Kingdom)
[1858] ADSEE™ 900: fatty alcohol ethoxylate (C10) (Nouryon Surface Chemistry AB, Stenungsund, Sweden)
[1859] ADSEE™ 973: Alcohol ethoxylate blend (Nouryon Surface Chemistry AB, Stenungsund, Sweden)
[1860] LUCROP® ROIL: Blend of esterfied oils and surfactants (LEVACO Chemicals Gmbh, Leverkusen, Germany)
[1861] ADSEE™ ST4: Maltodextrin/virylpyrrolidone polymer (Nouryon Surface Chemistry AB, Stenungsund, Sweden)
[1862] Ethylan® 995: Alcohol ethoxylate propoxylate (C16-18) (Nouryon Surface Chemistry AB, Stenungsund, Sweden)
[1863] Ethomeen® C/15: Coco alkylamine ethoxylate (Nouryon Surface Chemistry AB, Stenungsund, Sweden)

### Rain Fastness Assay:

[1864] The rain fastness assay was performed in a 24 well plate. The wells were filled with a heated 1% agar solution that solidifies after cooling to room temperature. 12 mm Leaf discs of preferred plants were prepared and added on top of the agar (the agar supported the leaf to not dry out so quickly).

[1865] After preparation of tank mix-formulations a 25 pL droplet of each sample were put in the middle of the leaf disc. The spreading behavior of the droplet was observed to avoid including results of samples in which the droplet spread so far that material was lost from the leaf. After addition of all samples the well plate was left to dry in a fume hood for 24h.

[1866] When dried, each disc was washed with 1 mL of tap water. The water was dispensed onto the leaf a total of 3 times. Afterwards the sample was analyzed for enzyme activity to determine residual amount on the leaf by using following equation:

$$\% Retention of treatment = 1 - ( activity units enzyme \text{} in \text{} wash \text{} \text{} solution / \\ activity \text{} units \text{} spray \text{} - solution added onto leaf )$$

The amount of protein added to spray solutions was given as weight percent (% w/w) protein of interest, which in the case of enzymes was determined using a colorimetric assay.

### Example 1

[1867] The retention of three enzymes—a cellobiose oxidase obtained from Microdochium nivale (NZ protein #6; SEQ ID NO: 6), a catalase obtained from Aspergillus niger (NZ protein #10; SEQ ID NO: 10), and a serine protease obtained from Nocardiopsis sp. (NZ protein #42; SEQ ID NO: 42)—with and without a trisiloxane adjuvant, BREAK-THRU® S 301, was evaluated. The spray-solutions were applied on top of tomato and grape leaf discs. Table 2 shows the retention of enzyme on the leaf after a simulated rain event.

TABLE 2
Retention of proteins on tomato and grape
leaves after a simulated rain event.

| | | % Retention |
|---|---|---|
| Foliar Spray Formulation | Leaf | of treatment |
| 0.0059% NZ Protein # 42 | Tomato | 40% |
| 0.95% K₂HPO₄ | | |
| 0.05% KH₂PO₄ | | |
| pH 7.9 | | |
| 0.0059% NZ Protein # 42 | Tomato | 95% |
| 0.05% BREAK-THRU ® S 301 | | |
| 0.95% K₂HPO₄ | | |
| 0.05% KH₂PO₄ | | |
| pH 7.9 | | |
| 0.0059% NZ Protein # 42 | Grape | 54% |
| 0.95% K₂HPO₄ | | |
| 0.05% KH₂PO₄ | | |
| pH 7.9 | | |
| 0.0059% NZ Protein # 42 | Grape | 100% |
| 0.05% BREAK-THRU ® S 301 | | |
| 0.95% K₂HPO₄ | | |
| 0.05% KH₂PO₄ | | |
| pH 7.9 | | |
| 0.001% NZ Protein # 6 | Grape | 68% |
| 0.6% K₂HPO₄ | | |
| 0.4% KH₂PO₄ | | |
| pH 6.9 | | |
| 0.001% NZ Protein # 6 | Grape | 95% |
| 0.05% BREAK-THRU ® S 301 | | |
| 0.6% K₂HPO₄ | | |
| 0.4% KH₂PO₄ | | |
| pH 6.9 | | |
| 0.027% NZ Protein # 10 | Tomato | 49% |
| 0.6% K₂HPO₄ | | |
| 0.4% KH₂PO₄ | | |
| pH 6.9 | | |
| 0.027% NZ Protein # 10 | Tomato | 79% |
| 0.05% BREAK-THRU ® S 301 | | |
| 0.6% K₂HPO₄ | | |
| 0.4% KH₂PO₄ | | |
| pH 6.9 | | |
| 0.027% NZ Protein # 10 | Grape | 62% |
| 0.6% K₂HPO₄ | | |
| 0.4% KH₂PO₄ | | |
| 0.027% NZ Protein # 10 | Grape | 86% |
| 0.05% BREAK-THRU ® S 301 | | |
| 0.6% K₂HPO₄ | | |
| 0.4% KH₂PO₄ | | |
| pH 6.9 | | |

[1868] The results in Table 2 show a clear difference in rainfastness when formulating the spray tank solution with a trisiloxane (BREAK-THRU® 5301). Further, the results show that there is a significant improvement in rainfastness, independent of enzyme class and leaf type.

### Example 2

[1869] The retention of a serine protease obtained from Nocardiopsis sp. (NZ protein #42; SEQ ID NO: 42) on tomato leaf discs was evaluated in presence of various commercially available organo-modified siloxanes.

[1870] Table 3 shows the retention of protease in the rainfastness assay with the tested organo-modified siloxanes. Both trisiloxanes (SILWET® L-77, SILWET® 408, SILWET® 719 and BREAK-THRU® S 301) and polysiloxanes (SILWET® HS-312 and SILWET® STIK 2) give rise to significantly improved rainfastness of the protease.

TABLE 3
Retention of a serine protease obtained from Nocardiopsis
sp. (NZ protein # 42; SEQ ID NO: 42) on tomato leaf
discs in presence of different organo-modified siloxanes.

| Foliar Spray Formulation | % Retention of treatment |
|---|---|
| 0.0059% NZ Protein # 42 | 58% |
| 0.0059% NZ Protein # 42 | 71% |
| 0.1% SILWET ™ HS-312 | |
| 0.0059% NZ Protein # 42 | 80% |
| 0.1% SILWET ™ L-77 | |
| 0.0059% NZ Protein # 42 | 94% |
| 0.1% SILWET ™ 408 | |
| 0.0059% NZ Protein # 42 | 93% |
| 0.1% SILWET ™ STIK 2 | |
| 0.0059% NZ Protein # 42 | 92% |
| 0.1% SILWET ™ 719 | |
| 0.0059% NZ Protein # 42 | 91% |
| 0.1% BREAK-THRU ® S 301 | |

### Example 3

[1871] The retention a serine protease obtained from Nocardiopsis sp. (NZ protein #42; SEQ ID NO: 42) on tomato leaf discs after a simulated rain event in 24-well plates was determined when combining the enzymes with a range of commercially available adjuvants.

TABLE 4
Effect of common types of adjuvants on
enzyme retention after simulated rain

| Formulation | % Retention of treatment |
|---|---|
| 0.0059% NZ Protein # 42 | 60% |
| 0.0059% NZ Protein # 42 | 87% |
| 0.1% BREAK-THRU ® S301 | |
| 0.0059% NZ Protein # 42 | 42% |
| 0.1% Tween ® L-1010 | |
| 0.0059% NZ Protein # 42 | 38% |
| 0.1% Tween ® 24 | |
| 0.0059% NZ Protein # 42 | 38% |
| 0.1% ADSEE ™ 900 | |
| 0.0059% NZ Protein # 42 | 20% |
| 0.1% ADSEE ™ 973 | |
| 0.0059% NZ Protein # 42 | 48% |
| 0.1% LUCROP ROIL | |
| 0.0059% NZ Protein # 42 | 45% |
| 0.1% ADSEE ™ ST4 | |
| 0.0059% NZ Protein # 42 | 48% |
| 0.1% ETHYLAN ® 995 | |
| 0.0059% NZ Protein # 42 | 22% |
| 0.1% ETHOMEEN ® C/15 | |

[1872] The experimental data show the unique rainfastness improvement of enzymes seen with organo-modified siloxane, which cannot be observed for other adjuvants commonly used in agricultural applications.

### Examples 4-5: Alkaline pH Improves the Fungicidal Efficacy of a Serine Protease

### Example 4

[1873] The efficacy of a serine protease obtained from Nocardiopsis sp (NZ protein #42; SEQ ID NO: 42) against tomato late blight and cucumber downy mildew was tested at alkaline pH in a plate-based assay.

[1874] For the tomato late blight plate assay, 24 well plates were lined with 2 mL. of 1.2% agar supplemented with 0.5% sorbitol. Each well had a 1.125 cm leaf disc cut with a #6 cork borer from tomato plants (cv. Moneymaker). The leaf disc was placed adaxial side up (top side facing up). To each leaf disc 15 μL of our treatments for a total of 8 wells/replicates per treatment. Leaf discs were allowed to dry for 2.25 hours in a laminar flow hood. Each leaf disc was wounded before inoculating 10 μL of the spore suspension at a concentration of 5E4 sporangia/mL onto the wound. Each plate was sealed with parafilm and held at 18 degrees C. and 18:6 light:dark cycle for 5 days before being scored (0=no infection, 1=infection).

[1875] For the cucumber downy mildew plate assay 48 well plates were lined with 700 L of 1% agar. Each well contains a 0.875 cm leaf disc of cucumber (cv. Iznik) with the bottom side facing up. To each well we add 15 L of our treatments for a total of 16 wells treatment. The discs were dried for 1-2 hours in a laminar flow hood. The pathogen was prepared by scraping infected and sporulating cucumber leaves with a 10 μL loop submerged in sterile water, and then the sporangia were quantified via a haemocytometer, and finally adjusted to a concentration of 5E4 sporangia/mL. Each leaf disc was wounded and then 10 μL of a 5E4 sporangia/mL solution was pipetted onto the wound. Plates were held at 18 degrees C. and 18:6 light:dark cycle for 5 days before being scored (0=no infection, 1=infection).

TABLE 5
Effect of pH on the effectiveness of a serine protease obtained
from Nocardiopsis sp. (NZ protein # 42; SEQ ID NO:
42) against tomato late blight and cucumber downy mildew

| | Protease dosage | | |
|---|---|---|---|
| | (mg active enzyme/L | | Pathogen |
| Spray solution | spray solution) | Leaf type | incidence |
| Water | 0 | Cucumber | 100% |
| Water | 6 | Cucumber | 92% |
| Water | 60 | Cucumber | 67% |
| 0.8% K₂HPO₄ | 0 | Cucumber | 94% |
| 0.06% KH₂PO₄ | | | |
| pH 7.9 | | | |
| 0.8% K₂HPO₄ | 6 | Cucumber | 63% |
| 0.06% KH₂PO₄ | | | |
| pH 7.9 | | | |
| 0.8% K₂HPO₄ | 60 | Cucumber | 21% |
| 0.06% KH₂PO₄ | | | |
| pH 7.9 | | | |
| Water | 0 | Tomato | 94% |
| Water | 6 | Tomato | 100% |
| Water | 60 | Tomato | 100% |
| 0.8% K₂HPO₄ | 0 | Tomato | 75% |
| 0.06% KH₂PO₄ | | | |
| pH 7.9 | | | |
| 0.8% K₂HPO₄ | 6 | Tomato | 44% |
| 0.06% KH₂PO₄ | | | |
| pH 7.9 | | | |
| 0.9% K₂HPO₄ | 60 | Tomato | 25% |
| 0.06% KH₂PO₄ | | | |
| pH 7.9 | | | |

### Example 5

[1876] The efficacy of a serine protease obtained from Nocardiopsis sp (NZ protein #42; SEQ ID NO: 42) was tested at alkaline pH against tomato late blight in green house trials.

[1877] For the greenhouse assays, 30 day old tomatoes (cv. Sungold) were treated with treatments at a rate of 30-40 gallons per acre and allowed to air dry for 24 hour before they were sprayed with a sporangia suspension (IE4 sporangia/mL in sterile ddH2O) of P. infestans.

[1878] After being sprayed with sporangia (approximately 10 mL per plant) plants were placed in the dark at 18 degrees C. with a humidifier for 48 hours. Plants were then removed and kept at 18 degrees C. with 16:8 light:dark cycle. After 5 days the plants were assessed for disease severity (percentage of disease tissue of the entire plant).

[1879] The disease severity measured on an untreated control was 32.5%.

TABLE 6
Effect of pH on the effectiveness of a serine protease
obtained from Nocardiopsis sp. (NZ protein # 42;
SEQ ID NO: 42) against tomato late blight

| | % Disease reduction compared |
|---|---|
| Treatment | to untreated control |
| Water | 58% |
| Protease: 15 mg active enzyme/L | |
| 0.8% K₂HPO₄ | 98% |
| 0.06% KH₂PO₄ | |
| pH 7.9 | |
| 0.1% SILWET ™ L-77 | |
| Protease: 15 mg active enzyme/L | |
| 0.9% K₂HPO₄ | 92% |
| pH 9 | |
| 0.1% SILWET ™ L-77 | |
| Protease: 15 mg active enzyme/L | |

### Examples 6-9: Organo-Modified Trisiloxanes Improve the Retention of Enzymes Sprayed on Plant Surfaces and their Effectiveness Against Zymoseptoria tritici

### Principle

[1880] A STB susceptible winter wheat cultivar (var. Hereford) growing in 1 L pots was first sprayed with enzyme and after 24 hours sprayed with a spore suspension of Zymoseptoria tritici. Percent leaf area attacked was assessed 14 days after inoculation and again with 3 days interval until the full effects were found. For scoring the standard EPPO scales were used (EPPO standards: Guidelines on good plant protection practice. Wheat. PP 2/10(1)). Experiments were conducted by Aarhus University, Flakkebjerg, Denmark.

### Materials

[1881] Winter wheat (var. Hereford), Zymoseptoria tritici spore suspensions (see Inoculum A and Inoculum B below), K₂HPO₄, KH₂PO₄, sodium acetate, acetic acid, glycerol, Tween® 20 (polyoxyethylene sorbitol ester, Sigma-Aldrich), BREAK-THRU® S 301 (polyether trisiloxane, Evonik Industries AG), and SILWET™ L77 (polyalkyleneoxide modified heptamethyltrisiloxane, Momentive Performance Materials Inc.). Enzymes are described in the examples

### Buffers

[1882] 1M potassium phosphate stock solutions, pH 6, 7 or 8, were prepared as shown in Table 7 using demineralized water.

TABLE 7

| | K₂PO₄ | KH₂PO₄ | Total volume |
|---|---|---|---|
| Buffer | (g) | (g) | (mL) |
| pH 6 | 5.24 | 9.52 | 100 |
| pH 7 | 11.20 | 4.85 | 100 |
| pH 8 | 16.30 | 0.90 | 100 |

[1883] If needed, pH was adjusted to target value using a hydrochloric acid or sodium hydroxide solution. 1 M acetate, pH 5 stock solution was prepared by mixing 5.7 g sodium acetate and 1.8 g glacial acetic acid with water (total volume 100 mL) (pH 5 buffer).

Inoculums (Zymoseptoria tritici Spore Suspension)

### Inoculum A

[1884] Five isolates of Zymoseptoria tritici, collected in 2020 from naturally infected plants in Danish fields and considered to represent the natural Septoria community in Denmark that year, were grown on PDA (Potato Dextrose Agar, available e.g. from Sigma-Aldrich) and respective spores harvested and mixed into an unique suspension with a concentration similar to 2×10⁶ spores per ml. The inoculum was freshly prepared before use and contained 0.1% Tween® 20 to ensure good spreading on the leaves.

### Inoculum B

[1885] Five isolates of Zymoseptoria tritici, collected in 2021 from naturally infected plants in Danish fields and considered to represent the natural Septoria community in Denmark that year, were grown on PDA (Potato Dextrose Agar, available e.g. from Sigma-Aldrich) and respective spores harvested and mixed into an unique suspension with a concentration similar to 2×10⁶ spores per ml. The inoculum was freshly prepared before use and contained 0.1% Tween® 20 to ensure good spreading on the leaves.

### Procedure

[1886] 1) Wheat kernels were sown in 1 L pots and allowed to germinate and grow under greenhouse conditions for approximately 2 weeks until reaching the two-leaf crop growth stage (BBCH12).
[1887] 2) A tank mix for each enzyme to be tested was prepared by diluting the buffer stock solution 100-fold (resulting concentration in tank mix was 10 mM) and adding the enzyme to the concentration indicated in the examples and surfactant to a final concentration of 0.1% (w/v). The buffer pH, type of surfactant and type of enzyme are given in the examples. In some experiments no buffer was added.
[1888] 3) The plants were treated by spraying the tank mix solution using a cabin sprayer (volume—600 mL; 150 L/ha, 3.6 km/hour, yellow nozzles 0.2). Tank mix solutions were prepared a few hours before application took place. The pH of the buffer depended on the enzyme used.
[1889] 4) For the Septoria inoculum, 5 isolates of Zymoseptoria tritici collected from naturally infected plants in 2020 Danish fields were grown on PDA and the respective spores collected and mixed into a solution. The Septoria inoculum had a concentration similar to 2×10⁶ spores/mL and contained 0.1% Tween® 20 to ensure that the spores spread well on the leaves. The inoculum was freshly prepared before use.
[1890] 5) 24 hours after application of the enzyme, the plants were sprayed with the Septoria inoculum (2 mL per pot). After inoculation, the plants were kept under high relative humidity, covered with black plastic for 3 days and transparent plastic for additional 9 days to ensure infection and further development of the pathogen.
[1891] 6) 6 replicates were made for each condition. As control, plants were sprayed with a tank mix prepared with 0.1% SILWET™L-77 (no enzyme added).
[1892] 7) Percent leaf area attacked by STB was determined 14 days after inoculation and again with 3 days interval until the full effects were found. For scoring, the standard EPPO scale was used (EPPO standards: Guidelines on good plant protection practice. Wheat. PP 2/10(1)).

### Example 6

[1893] Enzymes were tested for efficacy on Zymoseptoria tritici infected winter wheat as described above using Inoculum A. The enzymes tested, buffers and surfactants used as well as results obtained are described in Table 8. Results are presented as percent disease control in relation to the untreated control (UTC) at 18.7% disease pressure. The higher the % control, the better is the result. 100% means no disease was detected in the treatment and 0% means disease as at the same level as the untreated control (UTC). Tank mix with pH buffer and SILWET™ L-77 improved the performance of NZ protein numbers 1 & 10, 1 (p=0.153), 42 (p=0.004), 21 (p=0.014) and 22, as compared to tank mix with Tween 20.

TABLE 8
Effect of an organo-modified trisiloxane on
the efficacy of enzymes sprayed on wheat

| Enzyme | Tank mix description | | | |
|---|---|---|---|---|
| Treatment | | Enzyme | | |
| NZ Protein | | conc. | | % |
| #(s) | Buffer | mg/mL | surfactant | Control |
| UTC | — | — | SILWET ™ L-77 | 0.0 |
| 1 & 10 | — | 0.034 | Tween ® 20 | 53.6 |
| 1 & 10 | pH 7 | 0.034 | SILWET ™ L-77 | 61.6 |
| 1 | — | 0.220 ** | Tween ® 20 | 32.1 |
| 1 | pH 6 | 0.220 ** | SILWET ™ L-77 | 64.3 |
| 42 | — | 0.068 | Tween ® 20 | 33.0 |
| 42 | pH 8 | 0.068 | SILWET ™ L-77 | 75.9 |
| 21 | — | 0.122 | Tween ® 20 | 56.3 |
| 21 | pH 5 | 0.122 | SILWET ™ L-77 | 79.5 |
| 22 | — | 0.038 | Tween ® 20 | 34.8 |
| 22 | pH 5 | 0.038 | SILWET ™ L-77 | 50.9 |

** 0.1 mL glycerol per 100 mL tank mix was included

### Example 7

[1894] Enzymes were tested for efficacy on Zymoseptoria tritici infected winter wheat as described above using Inoculum A. The enzymes tested, buffers and surfactants used as well as results obtained are described in Table 9. Results are presented as percent disease control in relation to the untreated control (UTC) at 15.7% disease pressure. The higher the % control, the better is the result. 100% means no disease was detected in the treatment and 0% means disease as at the same level as the untreated control (UTC). Tank mix with pH buffer and SILWET™ L-77 significantly improved the performance of the pectinase mixture (p=0.069), as compared to tank mix with Tweent 20.

TABLE 9
Effect of an organo-modified trisiloxane on
the efficacy of enzymes sprayed on wheat

| Enzyme | Tank mix description | | | |
|---|---|---|---|---|
| Treatment | | Enzyme | | |
| NZ Protein | | conc. | | % |
| #(s) | Buffer | mg/mL | surfactant | Control |
| UTC | | | SILWET ™ L-77 | 0.0 |
| pectinases | — | 0.023 | Tween ® 20 | 37.2 |
| pectinases | pH 5 | 0.023 | SILWET ™ L-77 | 61.7 |
| 45 | — | 0.051 | Tween ® 20 | 76.1 |
| 45 | pH 8 | 0.051 | SILWET ™ L-77 | 76.1 |

### Example 8

[1895] Enzymes were tested for efficacy on Zymoseptoria tritici infected winter wheat as described above using Inoculum B. The enzymes tested, buffers and surfactants used as well as results obtained are described in Table 10. Results are presented as percent disease control in relation to the untreated control (UTC) at two timepoints: T1—19.2% disease pressure; T2—29.2% disease pressure. The higher the % control, the better is the result. 100% means no disease was detected in the treatment and 0% means disease as at the same level as the untreated control (UTC). Tank mix with pH buffer and SILWET™ L-77 improved the performance of NZ protein numbers 42, as compared to tank mix with pH buffer and BREAK-THRU® S 301. Tank mix with pH buffer and BREAK-THRU® S 301 improved the performance of NZ protein numbers 10, as compared to tank mix with pH buffer and SILWET™ L-77. Tank mix with pH buffer and SILWET™ L-77 improved the performance of NZ protein number 1, as compared to tank mix with pH buffer and BREAK-THRU® S 301 or Tween® 20 alone. Tank mix with pH buffer and BREAK-THRU® S 301 also improved the performance of NZ protein number 1, as compared to tank mix with TWEEN® 20 alone.

TABLE 10
Effect of organo-modified trisiloxanes on
the efficacy of enzymes sprayed on wheat

| Enzyme | Tank mix description | | | % | % |
|---|---|---|---|---|---|
| Treatment | | Enzyme | | Con- | Con- |
| NZ Protein | Buff- | conc. | | trol | trol |
| #(s) | er | mg/mL | surfactant | T1 | T2 |
| UTC | — | — | SILWET ™ L-77 | 0.0 | 0.0 |
| 42 | pH 8 | 0.068 | SILWET ™ L-77 | 67.0 | 62.9 |
| 42 | pH 8 | 0.068 | SILWET ™ L-77 | 53.9 | 74.3 |
| 42 | pH 8 | 0.068 | BREAK-THRU ® | 39.1 | 42.9 |
| | | | S 301 | | |
| 42 | pH 8 | 0.017 | SILWET ™ L-77 | 80.9 | 82.3 |
| 42 | pH 8 | 0.017 | BREAK-THRU ® | 54.8 | 55.4 |
| | | | S 301 | | |
| 10 | pH 7 | 0.034 | SILWET ™ L-77 | 42.6 | 48.6 |
| 10 | pH 7 | 0.034 | BREAK-THRU ® | 83.5 | 71.4 |
| | | | S 301 | | |
| 10 | — | 0.034 | Tween ® 20 | 91.3 | 88.6 |
| 1 | pH 6 | 0.220 | SILWET ™ L-77 | 89.6 | 84.0 |
| 1 | pH 6 | 0.220 ** | BREAK-THRU ® | 84.3 | 77.7 |
| | | | S 301 | | |
| 1 | pH 6 | 0.110 *** | SILWET ™ L-77 | 90.4 | 84.6 |
| 1 | — | 0.220 ** | Tween ® 20 | 75.7 | 61.1 |

** 0.1 mL glycerol per 100 mL tank mix was included
*** 0.05 mL glycerol per 100 mL tank mix was included

### Example 9

[1896] Enzymes were tested for efficacy on Zymoseptoria tritici infected winter wheat as described above using Inoculum B. The enzymes tested, buffers and surfactants used as well as results obtained are described in Table 11. Results are presented as percent disease control in relation to the untreated control (UTC) at two timepoints: T1—16.7% disease pressure; T2—26.7% disease pressure. The higher the % control, the better is the result. 100% means no disease was detected in the treatment and 0% means disease as at the same level as the untreated control (UTC). Tank mix with pH buffer and SILWET™ L-77 improved the performance of NZ protein number 21, as compared to tank mix with pH buffer and BREAK-THRU® S 301 or TWEEN® 20 alone. Tank mix with pH buffer and BREAK-THRU® S 301 also improved the performance of NZ protein number 21, as compared to tank mix with TWEEN® 20 alone. Tank mix with pH buffer and SILWET™ L-77 improved the performance of NZ protein number 22, as compared to tank mix with pH buffer and BREAK-THRU® 301. Tank mix with pH buffer and SILWET™ L-77 improved the performance of NZ protein number 25, as compared to tank mix with TWEEN® 20.

TABLE 11
Effect of organo-modified trisiloxanes on
the efficacy of enzymes sprayed on wheat

| Enzyme | Tank mix description | | | % | % |
|---|---|---|---|---|---|
| Treatment | | Enzyme | | Con- | Con- |
| NZ Protein | Buff- | conc. | | trol | trol |
| #(s) | er | mg/mL | surfactant | T1 | T2 |
| UTC | — | — | SILWET ™ L-77 | 0.0 | 0.0 |
| 21 | pH 5 | 0.122 | SILWET ™ L-77 | 85.0 | 85.6 |
| 21 | pH 5 | 0.122 | BREAK-THRU ® S 301 | 79.0 | 70.6 |
| 21 | — | 0.122 | Tween ® 20 | 61.0 | 45.6 |
| 22 | pH 5 | 0.038 | SILWET ™ L-77 | 87.0 | 84.4 |
| 22 | pH 5 | 0.038 | BREAK-THRU ® S 301 | 70.0 | 65.6 |
| 25 | pH 7 | 0.022 | SILWET ™ L-77 | 52.0 | 58.6 |
| 25 | — | 0.037 | Tween ® 20 | 28.1 | 32.3 |

### Example 10: Organo-Modified Trisiloxanes Improve the Retention of Enzymes Suraved on Plant Surfaces and their Effectiveness Against Phytophthora infestans

### Principle

[1897] A late blight susceptible tomato variety (Sungold) was grown in the greenhouse for approximately 3-weeks and then leaves were harvested for leaf disk assays within 24-well plates. Leaf disks were treated with 0.25 to 2.5 mg/ml enzyme and allowed to dry fully for approximately 2 hours. Once dry, 10 μl of Phytophthora infestans (US 23) was pipetted onto the leaf surface at a concentration of 1×10⁵ sporangia per ml. Disease was assessed 6 days post inoculation. Experiments were conducted by Novozymes Biologicals, Salem, VA, USA.

### Materials

[1898] Susceptible tomato plants (Sungold)
[1899] Rye A media (60 g Rye grains, 20 g sucrose, 15 g agar per liter)
[1900] Enzyme(s)
[1901] Phytophthora infestans (US 23 isolate)
[1902] Potassium Phosphate Buffer (0.05 M, pH 7.88)
[1903] Adjuvant A: SILWET™ L-77 (trisiloxane ethoxylate)
[1904] Adjuvant B: BREAK-THRU® SP 133 (polyglycerol esters and fatty acid esters)
[1905] 0.5% Butterfield's buffer agar (5 g agar per liter, 1 L Butterfield's buffer), 2 ml within each well of a 24-well plate
[1906] 10 ml atomizer spray bottles
[1907] Incubator (18° C.) with cool fluorescent light on timer
[1908] 14 mm Cork borer
[1909] Hemocytometer
[1910] Phase contrast microscope (10× objective)

### Procedure

### Leaf Disk Assay

[1911] 1. 24-well plates containing 2 ml of solidified 0.5% Butterfield's buffer agar (Butterfield's buffer was used as a replacement to typical water agar to balance pH) were briefly dried within a hood to remove condensation.
[1912] 2. Enzyme dilutions were made with potassium phosphate buffer (0.05 M, pH 7.88) with protein concentrations of one of the following buffers and protein concentrations 0.25, 0.5, 1.0, and 2.5 mg/ml
[1913] 3. In some instances, adjuvants were also applied with enzymes and their appropriate buffers. The adjuvants and tested concentrations are listed below:
   [1914] SILWET™ L-77 at a concentration of 0.1%
   [1915] BREAK-THRU® SP 133 at a concentration of 0.1%
[1916] 4. Leaves were detached from the mid-region of a susceptible tomato variety (Sungold) at approximately 3-weeks of age.
[1917] 5. Leaf disk were excised using a cork borer (14 mm diameter) and placed (adaxial/upper side up) into each of the wells.
[1918] 6. Enzyme dilutions were applied to the leaf surface with atomizer spray bottles. Two spray pumps were applied to each leaf disk which adequately covered the leaf disks without pooling. Wells with different treatments were covered during application to eliminate contamination from overspray.
[1919] 7. Enzyme applications were left to dry on the leaf surface for approximately 2 hours.
[1920] 8. While waiting, the spore solution was prepared using the protocol below.
[1921] 9. After enzymes were dry, the center of the leaf disk was inoculated with 10 μl of the spore suspension containing 1×10⁵ sporangia per ml (or 10 μl sterile water for uninoculated controls).
[1922] 10. Plates were sealed with parafilm and incubated at 18° C. under a 16-hour light/8-hour dark cycle.
[1923] 11. Images of the leaf disk plates were captured and analyzed for disease at 5-6 days post infection.

### Spore Solution Preparation

[1924] 1. Phytophthora infestans was grown on Rye A medium at 18° C. under dark conditions for 2-3 weeks.
[1925] 2. Plates were flooded with approximately 3 ml cold sterile distilled water, and the surface of the plate was gently scraped with an inoculation loop.
[1926] 3. Water was pipetted off the plate and placed into a 15 ml conical tube. At roughly a 45-degree angle, another 2 ml of sterile distilled water was pipetted one ml at a time over the plate. The volume was transferred into the same 15 ml conical tube.
[1927] 4. Sporangia were enumerated using a hemocytometer.
[1928] 5. The spore suspension was incubated at 4° C. for 0.5-2 hours to induce zoospore release and then diluted to a concentration of 1×10⁵ sporangia per ml.

### Example 10

[1929] Enzymes were tested for efficacy against Phytophthora infestans infected tomato as described above. In this example, enzymes were diluted using potassium phosphate buffer (0.05 M, pH 7.88) and tested at concentrations of 0.25, 0.5. 1.0, and 2.5 mg protein per ml. Enzymes were tested without adjuvant as well as with 0.1% SILWET™ L-77 or 0.1% BREAK-THRU® SP 133. Efficacy observed for disease control on the leaf disks at 6 days post infection is shown in Table 12. A minimum of two experimental repeats with four replicates each were completed for each treatment. Disease reduction is defined as (−) no reduction, (+) mild reduction, (++) moderate reduction, and (+++) severe reduction. Dose responses can be observed for the enzymes as well as improved disease reduction with the addition of SILWET™ L-77 and BREAK-THRU®SP 133. In some instances, addition of the adjuvant allowed for comparable efficacy results at a lower enzyme dosage.

TABLE 12
Effect of organo-modified trisiloxanes on the
efficacy of enzymes sprayed on tomato leaves

| Enzyme | | | |
|---|---|---|---|
| Treatment | Protein | | |
| NZ Protein | concentration | | Disease |
| #(s) | (mg/ml) | Adjuvant | Reduction |
| UTC | 0 | none | − |
| UTC | 0 | SILWET ™ L-77 | + |
| UTC | 0 | BREAK-THRU ® SP 133 | − |
| 45 | 0.25 | None | − |
| 45 | 0.50 | None | − |
| 45 | 1.0 | None | − |
| 45 | 2.5 | None | ++ |
| 45 | 0.25 | SILWET ™ L-77 | + |
| 45 | 0.50 | SILWET ™ L-77 | + |
| 45 | 1.0 | SILWET ™ L-77 | +++ |
| 45 | 2.5 | SILWET ™ L-77 | +++ |
| 45 | 0.25 | BREAK-THRU ® SP 133 | + |
| 45 | 0.50 | BREAK-THRU ® SP 133 | + |
| 45 | 1.0 | BREAK-THRU ® SP 133 | + |
| 45 | 2.5 | BREAK-THRU ® SP 133 | ++ |
| 33 | 0.25 | None | − |
| 33 | 0.50 | None | − |
| 33 | 1.0 | None | + |
| 33 | 2.5 | None | ++ |
| 33 | 0.25 | SILWET ™ L-77 | + |
| 33 | 0.50 | SILWET ™ L-77 | + |
| 33 | 1.0 | SILWET ™ L-77 | + |
| 33 | 2.5 | SILWET ™ L-77 | +++ |
| 33 | 0.25 | BREAK-THRU ® SP 133 | − |
| 33 | 0.50 | BREAK-THRU ® SP 133 | − |
| 33 | 1.0 | BREAK-THRU ® SP 133 | − |
| 33 | 2.5 | BREAK-THRU ® SP 133 | +++ |
| 43 | 0.25 | None | + |
| 43 | 0.50 | None | + |
| 43 | 1.0 | None | + |
| 43 | 2.5 | None | ++ |
| 43 | 0.25 | SILWET ™ L-77 | + |
| 43 | 0.50 | SILWET ™ L-77 | + |
| 43 | 1.0 | SILWET ™ L-77 | ++ |
| 43 | 2.5 | SILWET ™ L-77 | ++ |
| 43 | 0.25 | BREAK-THRU ® SP 133 | − |
| 43 | 0.50 | BREAK-THRU ® SP 133 | − |
| 43 | 1.0 | BREAK-THRU ® SP 133 | ++ |
| 43 | 2.5 | BREAK-THRU ® SP 133 | +++ |
| 44 | 0.25 | None | + |
| 44 | 0.50 | None | + |
| 44 | 1.0 | None | ++ |
| 44 | 2.5 | None | +++ |
| 44 | 0.25 | SILWET ™ L-77 | + |
| 44 | 0.50 | SILWET ™ L-77 | + |
| 44 | 1.0 | SILWET ™ L-77 | ++ |
| 44 | 2.5 | SILWET ™ L-77 | +++ |
| 44 | 0.25 | BREAK-THRU ® SP 133 | + |
| 44 | 0.50 | BREAK-THRU ® SP 133 | + |
| 44 | 1.0 | BREAK-THRU ® SP 133 | +++ |
| 44 | 2.5 | BREAK-THRU ® SP 133 | +++ |

1. Use of an organo-modified siloxane, optionally an organo-modified trisiloxane or an organo-modified polysiloxane, for improving the rainfastness of a protein on a plant surface.

2. The use according to claim 1, characterized in that said organo-modified siloxane is an organo-modified trisiloxane comprising one or more polyether groups, optionally a trisiloxane ethoxylate.

3. The use according to claim 1, characterized in that said organo-modified siloxane is an organo-modified polysiloxane comprising one or more polyether groups, optionally a polysiloxane ethoxylate.

4. The use according to claim 1, characterized in that said organo-modified siloxane is selected from the group consisting of trisiloxanes and polysiloxanes described by the general Formula I: [chemical structure]
wherein
A is 0-200, preferably A is 0-1, more preferably A is 0;
B is 0-200, preferably B is 0.5-2; more preferably B is 1;
A+B>0;
R¹ represents identical or different from each other hydrocarbon substituents of 1-10 carbons or hydrogen, preferably methyl, ethyl, propyl and/or phenyl substituents, more preferably methyl substituents; and
R² represents identical or different from each other polyether substituents of the general Formula II: [chemical structure]
wherein
R³ represents identical or different from each other hydrocarbon moieties of 1-8 carbons, which optionally is interrupted by oxygen atoms, preferably linear hydrocarbons of 2-4 carbons, more preferably —CH₂—CH₂—CH₂—;
R⁴ represents identical or different from each other hydrocarbon substituents of 1-12 carbons or hydrogen, preferably methyl, ethyl, phenyl and/or hydrogen substituents;
R⁵ represents identical or different from each other hydrocarbon substituents of 1-16 carbons, which optionally contains urethane, carbonyl or carboxylic acid functionality, or hydrogen;
preferably methyl or hydrogen; more preferably hydrogen;
C is 0-60, preferably C is 1-15;
D is 0-60, preferably D is 0-10;
E is 0-20, preferably E is 0-10, more preferably E is 0; and
C+D+E>0.

5. The use according to claim 1, characterized in that said protein is an enzyme, optionally a protein that exhibits lipase, triacylglycerol lipase, pectinesterase, phospholipase, lysophospholipase, amylase, glucosidase, galactosidase, cellulase, glucanase, xylanase, ceramidase, dextranase, chitinase, chitosanase, galacturonase, fucosidase, lysozymes, xylosidase, lucosidass, pullulanase, mannosidase, amidase, asparaginase, aminidase, maltohydrolases, cellobiosidase, pectinase, aminopeptidase, serine peptidase and/or metallopeptidase activity.

6. The use according to claim 1, characterized in that said protein:
a) comprises one or more polypeptides having about/at least 60, 61, 62, 63, 64, 65, 66, 67, 68, 69, 70, 71, 72, 73, 74, 75, 76, 77, 78, 79, 80, 81, 82, 83, 84, 85, 86, 87, 88, 89, 90, 91, 92, 93, 94, 95, 96, 97, 98, 99 or 100% sequence identity to one or more of SEQ ID NOs: 1-48 and 98-150 or a mature polypeptide thereof;
b) comprises one or more polypeptides encoded by a polynucleotide having about/at least 60, 61, 62, 63, 64, 65, 66, 67, 68, 69, 70, 71, 72, 73, 74, 75, 76, 77, 78, 79, 80, 81, 82, 83, 84, 85, 86, 87, 88, 89, 90, 91, 92, 93, 94, 95, 96, 97, 98, 99 or 100% sequence identity to any one or more of SEQ ID NOs: 49-97 and 151-203 or the cDNA sequence thereof,
c) comprises one or more polypeptides derived from any one of SEQ ID NOs: 1-48 and 98-150 by substitution, deletion or insertion of one or more amino acids;
d) comprises one or more polypeptides derived from a mature polypeptide of any one of SEQ ID NOs: 1-48 and 98-150 by substitution, deletion or insertion of one or more amino acids;
e) comprises one or more polypeptides derived from any one of a) through d) above wherein the N- and/or C-terminal end has been extended by the addition of one or more amino acids;
f) comprises a fragment of any one of a) through e) above; and/or
g) is an enzymatically active fragment/mutant/variant of any one of SEQ ID NOs: 1-48 and 98-150 or a mature polypeptide thereof.

7. An aqueous liquid formulation, characterized in that it comprises:
a) 0.0001 to 40% w/w protein, preferably 0.0001 to 25% w/w, more preferably 0.0001 to 1% w/w;
b) 0.001 to 50% w/w organo-modified trisiloxane, optionally an organo-modified trisiloxane or an organo-modified polysiloxane, preferably 0.001 to 10% w/w, more preferably 0.025 to 0.5% w/w;
c) 0.001 to 10% w/w pH control component, preferably 0.001 to 5% w/w, more preferably 0.01 to 1% w/w.

8. The aqueous liquid formulation according to claim 7, characterized in that said organo-modified siloxane is an organo-modified trisiloxane comprising one or more polyether groups, optionally a trisiloxane ethoxylate.

9. The aqueous liquid formulation according to claim 7, characterized in that said organo-modified siloxane is an organo-modified polysiloxane comprising one or more polyether groups, optionally a polysiloxane ethoxylate.

10. The aqueous liquid formulation according to claim 7, characterized in that said organo-modified siloxane is selected from the group consisting of trisiloxanes and polysiloxanes described by the general Formula I: [chemical structure]
wherein
A is 0-200, preferably A is 0-1, more preferably A is 0;
B is 0-200, preferably B is 0.5-2; more preferably B is 1;
A+B>0;
R¹ represents identical or different from each other hydrocarbon substituents of 1-10 carbons or hydrogen, preferably methyl, ethyl, propyl and/or phenyl substituents, more preferably methyl substituents; and
R² represents identical or different from each other polyether substituents of the general Formula II: [chemical structure]
wherein
R³ represents identical or different from each other hydrocarbon moieties of 1-8 carbons, which optionally is interrupted by oxygen atoms, preferably linear hydrocarbons of 2-4 carbons, more preferably —CH₂—CH₂—CH₂—;
R⁴ represents identical or different from each other hydrocarbon substituents of 1-12 carbons or hydrogen, preferably methyl, ethyl, phenyl and/or hydrogen substituents;
R⁵ represents identical or different from each other hydrocarbon substituents of 1-16 carbons, which optionally contains urethane, carbonyl or carboxylic acid functionality, or hydrogen;
preferably methyl or hydrogen; more preferably hydrogen;
C is 0-60, preferably C is 1-15;
D is 0-60, preferably D is 0-10;
E is 0-20, preferably E is 0-10, more preferably E is 0; and
C+D+E>0.

11. The aqueous liquid formulation according to claim 7, characterized in that said protein is an enzyme, optionally a protein that exhibits lipase, triacylglycerol lipase, pectinesterase, phospholipase, lysophospholipase, amylase, glucosidase, galactosidase, cellulase, glucanase, xylanase, ceramidase, dextranase, chitinase, chitosanase, galacturonase, fucosidase, lysozymes, xylosidase, lucosidass, pullulanase, mannosidase, amidase, asparaginase, aminidase, maltohydrolases, cellobiosidase, pectinase, aminopeptidase, serine peptidase and/or metallopeptidase activity.

12. The aqueous liquid formulation according to claim 7, characterized in that said protein:
a) comprises one or more polypeptides having about/at least 60, 61, 62, 63, 64, 65, 66, 67, 68, 69, 70, 71, 72, 73, 74, 75, 76, 77, 78, 79, 80, 81, 82, 83, 84, 85, 86, 87, 88, 89, 90, 91, 92, 93, 94, 95, 96, 97, 98, 99 or 100% sequence identity to one or more of SEQ ID NOs: 1-48 and 98-150 or a mature polypeptide thereof;
b) comprises one or more polypeptides encoded by a polynucleotide having about/at least 60, 61, 62, 63, 64, 65, 66, 67, 68, 69, 70, 71, 72, 73, 74, 75, 76, 77, 78, 79, 80, 81, 82, 83, 84, 85, 86, 87, 88, 89, 90, 91, 92, 93, 94, 95, 96, 97, 98, 99 or 100% sequence identity to any one or more of SEQ ID NOs: 49-97 and 151-203 or the cDNA sequence thereof, c) comprises one or more polypeptides derived from any one of SEQ ID NOs: 1-48 and 98-150 by substitution, deletion or insertion of one or more amino acids;
d) comprises one or more polypeptides derived from a mature polypeptide of any one of SEQ ID NOs: 1-48 and 98-150 by substitution, deletion or insertion of one or more amino acids;
e) comprises one or more polypeptides derived from any one of a) through d) above wherein the N- and/or C-terminal end has been extended by the addition of one or more amino acids;
f) comprises a fragment of any one of a) through e) above; and/or
g) is an enzymatically active fragment/mutant/variant of any one of SEQ ID NOs: 1-48 and 98-150 or a mature polypeptide thereof.

13. Currently Amended A method for preparing an aqueous liquid formulation according to claim 7, characterized in that it comprises:
a) providing an aqueous buffer solution comprising said organo-modified siloxane and said pH control component; and
b) introducing said protein into said aqueous buffer solution.

14. A method for depositing a protein on a plant surface, characterized in that it comprises:
a) preparing an aqueous liquid formulation according to claim 7; and
b) spraying said aqueous liquid formulation onto a plant, thereby depositing said protein on a surface of said plant.

15. A method for improving the rainfastness of a protein in an aqueous liquid formulation, characterized in that it comprises introducing an organo-modified siloxane, optionally an organo-modified trisiloxane or an organo-modified polysiloxane, optionally a polyether trisiloxane or a polyether polysiloxane, into said aqueous liquid formulation to a concentration of 0.001 to 50% w/w, preferably 0.001 to 10% w/w/, more preferably 0.025 to 0.5% w/w.

The application's sequence listing, which the Patent Office published only in electronic form, follows.

SEQUENCE LISTING (203 sequences)

SEQ ID NO: 1 - protein, 605 aa, Aspergillus niger
MQTLLVSSLVVSLAAALPHYIRSNGIEASLLTDPKDVSGRTVDYIIAGGGLTGLTTAARLTENPNISVLVIESGSYESDRGPIIEDLNAYGDIFGSSVDHAYETVELATNNQTALIRSGNGLGGSTLVNGGTWTRPHKAQVDSWETVFGNEGWNWDNVAAYSLQAERARAPNAKQIAAGHYFNASCHGTNGTVHAGPRDTGDDYSPIVKALMSAVEDRGVPTKKDFGCGDPHGVSMFPNTLHEDQVRSDAAREWLLPNYQRPNLQVLTGQYVGKVLLSQNGTTPRAVGVEFGTHKGNTHNVYAEHEVLLAAGSAVSPTILEYSGIGMKSILEPLGIDTVVDLPVGLNLQDQTTATVRSRITSAGAGQGQAAWFATFNETFGDYSEKAHELLNTKLEQWAEEAVARGGFHNTTALLIQYENYRDWIVNHNVAYSELFLDTAGVASFDVWDLLPFTRGYVHILDKDPYLHHFAYDPQYFLNELDLLGQAAATQLARNISNSGAMQTYFAGETIPGDNLAYDADLSAWTEYIPYHFRPNYHGVGTCSMMPKEMGGVVDNAARVYGVQGLRVIDGSIPPTQMSSHVMTVFYAMALKISDAILEDYASMQ

SEQ ID NO: 2 - protein, 607 aa, Aspergillus chevalieri
MKPLLWSLFLSVATALPKFPREHLGVEPQLLTDPTVLANTTVDYIIAGGGLTGLTIAARLTEDPNIKVLVIESGYFESNRGPIIEDLNRYGEIFGTEVDHAFETVQLAVNNRTEIIRSGNGLGGSTLINGGTWTRPHKVQVDSWETVFGNQGWNWDDLLPYMLKIEKARPPNQRQIEAGHYFNPQCHGFNGSVHAGPRDTGEPYSPIMRALMDTVSAEGVPVRKDLCCGDPHGVSMFLNTLYPSQIRADAAREYLVPNYYRPNFQVLTGQRVGKVLLDKTVPGSPKAIGVEFGTHRTRKYEAYARREVLLAAGSTISPTILEYSGIGMKSVLDSVGIEQVVELPVGVNLQDQTTVHVESRITPAGAGQGQAAYFATFNETFGDFAPQAHELLNTKLDQWAEEVVARGGFNNATALRIQYENYRNWLVNDNVAFSELFLDTAGKISFDVWDLIPFTRGYVHIADKDPYLRRLYNNPQYLLNELDVLGEAAASKLARELSSKGAMAQYYAGETVPGFDHLPADASLRDWAKYVKDRFRPNYHAVSTCAMMSKELGGVVDSAARVYDVERLRVVDGSIPPTQVSSHVMTVFYGMAEKIAEAILQDYHARK

SEQ ID NO: 3 - protein, 605 aa, Penicillium viridicatum
MKLLGVLSGLGLVVVATALPLQELDLQSTLLTDPRKVAGETFDYVIAGGGLTGLTVAARLTENPDINVLVIESGFYESNIGPIIENLNHYGDIFTTSVDQAFETVPLAIHNRTEIVRSGKGLGGSTLVNGGSWTRPHKAQINSWEKVFGMEGWNWDNLLPYMNKVEASRPPNAAQIAAGHYFDPACHGVNGTVQVGPRDTGESYSPMIKSLMETAKKSGVPVQKDFSCGVPHGISMFPNDVHEDQTRSDAAREWLLPNYKRKNLKVLTGQMVGRVLFDTTTSTPKAVGVNFGTHNKVNFDVHAKHEVLLAAGSTVSPQILEHSGVGLKTVLDKVGIKQVVELPVGLNLQDQTTTTVRSAINPIGAGQGQAAYFATFNETFGDQAPRAHQLLNTKLEEWAKDAVSRGGFHNETALLIQYQNYRDWLVNSDVSYAEIFIDTAGKLSLDLWDLIPFTRGYVHILDSDPYLRRFAYDPQYFLNELDLLGQAAASKLAREISNKGEMTKYFNSETVPGNNLAYNATLDQWVDYVKQNFRPNYHGVGTCSMMSKELGGVVDAAARVYDVEGLRVIDGSIPPTQVSSHVMTVFYGMAEKISEAVLSDYHASN

SEQ ID NO: 4 - protein, 607 aa, Aspergillus niveoglaucus
MRPLIWPLFLSVATALPKFPREHFDVQPQLLTDPTVLANTTVDYIIAGGGLTGLTIAARLTEDPKIKVLVIESGFFESNRGPIIEDLNSYGEIFGTEVDHAFETVSLAVNNRTENIRSGNGLGGSTLINGGTWTRPHKVQIDSWERVFGNEGWNWDDLLPYMLGIEKARHPNQRQIEAGHYFNPQCHGSNGTVHAGPRDTGESYSPIMKALMDTVSADGVPVRKDLGCGDPHGVSMFPNSLYESQIRADAAREWLVPNYYRPNLQVLTGQSVGKVLLDKTVPGAPKAIGVEFGTHRTRKYETFASREVLLAAGSTISPTILEYSGIGIKSVLDSVGIEQVVDLPVGLNLQDQTTVNLQSRITPDGAGQGQAAYFATFNETFGDFAPQAHELLNTKLDQWAEEVVARGGFHNATALRIQYENYRDWLVNDNVAYSELFLDTAGKISFDVWDLIPFTRGYVHIADKDPYLRRLSNDPQYFLNELDVLGQAAASKLARELSSRGAMAQYFASETVPGYDRLPADASLQDWAKYVKDRFRANYHAVSTCSMMPKEMGGVVDSTARVYGVERLRVVDGSIPPTQVSSHVMTVFYGMAVKIAEAILQDHHTRK

SEQ ID NO: 5 - protein, 605 aa, Talaromyces bacillisporus
MKSILIVSALASLAGAQGYTPAEQIDVQSSLISDPKNVSGRTFDYIIAGGGLTGLTVAAKLSEDPNISVLVIEKGFYESNDGPIIENPNDYGLIFGSSVDQNYLTVPMAINNRTLDIKSGKGLGGSTLINGDSWTGPDKVQIDSWETVLGNPGWNYHALKEYMNKAERARYPTTTQIAAGMYFNSTCHGFNGTVNSGPRDDGRPYSPLMKALMNTTSAMGVPTQADLLCGHPRGVSMIYNNLLPDQTRADAAREWLLPNYKRPNLSILTGQIVGKVLFDKTPTGPRAVGVNFGTNKAVNFNVSAKHEVLLAAGSNVSPLILEHSGIGLKSVLDQFNISQLVELPVGLNMQDQTTTTVRARAKASAAGQGQAVYFANFTEVFGNHTAQATNLLNTKLEQWANETVARGGFNNATALLIQYENYRKWLLDEDVAYVELFFDTNGKMNFDLWDLIPFTRGSVHIAHADPYLQSFSNNPMFLLNELDLLGQAAGSMLARELQNSGELSTYFDGEDIPGAELLPYDATLDGWVGYVKDNFRANWHAVSTCSMMPKELGGVVDSAARVYGTQGLRVIDGSIPPTQVSSHVMTVFYAMALKIADAILADYTA

SEQ ID NO: 6 - protein, 477 aa, Microdochium nivale
LVTRGAIEACLSAAGVPIDIPGTADYERDVEPFNIRLPYIPTAIAQTQTTAHIQSAVQCAKKLNLKVSAKSGGHSYASFGFGGENGHLMVQLDRMIDVISYNDKTGIAHVEPGARLGHLATVLNDKYGRAISHGTCPGVGISGHFAHGGFGFSSHMHGLAVDSVVGVTVVLADGRIVEASATENADLFWGIKGAGSNFGIVAVWKLATFPAPKVLTRFGVTLNWKNKTSALKGIEAVEDYARWVAPREVNFRIGDYGAGNPGIEGLYYGTPEQWRAAFQPLLDTLPAGYVVNPTTSLNWIESVLSYSNFDHVDFITPQPVENFYAKSLTLKSIKGDAVKNFVDYYFDVSNKVKDRFWFYQLDVHGGKNSQVTKVTNAETAYPHRDKLWLIQFYDRYDNNQTYPETSFKFLDGWVNSVTKALPKSDWGMYINYADPRMDRDYATKVYYGENLARLQKLKAKFDPTDRFYYPQAVRPVK

SEQ ID NO: 7 - protein, 504 aa, Chaetomium globosum
MQTLAPLLALLGLAATSHATSFARFTNETGTLTDCLTKAGVPIGESGTPEYKIDVASFNLRLNYTPAAVVAASTAQHVQDAVVCANKFGIKPTAKCGGHSYASFGLGGEDGHLVIEMSRMNKVVLDNVTGIATAEGGTRLGHLAMELYTQGKRAISHGTCPGVGVGGHLLHGGYGMSSHTHGLALDYVIGATVVLANGTVVECSETQHGELFWALRGAGASMGIVTEFRLKTFEAPGQLTYFVAPVQWPTEARALVGVTAVQEFAKTMPAELNMRLFIARRFVNLEGLFYGDKEDLKAALAPLVAKTNATLALATTGDWMEQIKHFGGGSNIDQGHGYEEHETFYSTSLYTKELNDEQLQNFVGYWFNQAKNNTRDWYVQIDLHGGENSAVSAPAADSTAYAHRDYLLMYLLYDRVDKGEYPAEGHTVMENFAGNITQGMERSDWGMYINYPNSRLDQKDAQLNYWGDNLPKLQAIKKDVDPEDVFHFPQGVMPAVRHQHQHQH

SEQ ID NO: 8 - protein, 509 aa, Neurospora crassa
MWLPLILLTATAAPILANPLSSPLNKRAAIDDCLKSAGVPADAQGSSEWRTDVNPFNQRLPYTPVAIAVPTTIEHIQGAVSCATKLGIKVTPKSGGHSYASFGLGGENGHLVVELDRMSKVTLDKTTNIADVQSGARLGHVATELPYFLAWPGLTKEGNRVGVGGHSLHGGFGFSSHTYGLAVDWIAAATVVLANSTVVTASPTENPDLFWALRGAGSNFGIVASFKFNTFAAPSQVTAFQINLPWNSASSIASGWEKLQDWLAAGNMPKEMNMRVFGSPSQTQLQGLYHGSSSALRTAVQPLLSTLGASLSNAQQYDWMGAFTYYTYGGTVDVTHPYNTVETFYSKSLVTTALPSAALNSVANYWINTAKRVSRDWFIIIDMHGGPKSAITSSTTNSANYTSSYAYRAPEYLFLYELYDRVMFGSYPSNGFSFLDGWVKSFTDNMKQEQWGMYINYADPTMKRAEAVGNYYRSSLSRLQKVKAQYDPNEVFYYPQSVEPARHQHQHQH

SEQ ID NO: 9 - protein, 620 aa, Thermothelomyces thermophilus
MKSFISAATLLVGILTPSVAAAPPSTPEQRDLLVPITEREEAAVKARQQSCNTPSNRACWTDGYDINTDYEVDSPDTGVVRPYTLTLTEVDNWTGPDGVVKEKVMLVNNSIIGPTIFADWGDTIQVTVINNLETNGTSIHWHGLHQKGTNLHDGANGITECPIPPKGGRKVYRFKAQQYGTSWYHSHFSAQYGNGVVGAIQINGPASLPYDTDLGVFPISDYYYSSADELVELTKNSGAPFSDNVLFNGTAKHPETGEGEYANVTLTPGRRHRLRLINTSVENHFQVSLVNHTMTIIAADMVPVNAMTVDSLFLGVGQRYDVVIEASRTPGNYWFNVTFGGGLLCGGSRNPYPAAIFHYAGAPGGPPTDEGKAPVDHNCLDLPNLKPVVARDVPLSGFAKRPDNTLDVTLDTTGTPLFVWKVNGSAINIDWGRPVVDYVLTQNTSFPPGYNIVEVNGADQWSYWLIENDPGAPFTLPHPMHLHGHDFYVLGRSPDESPASNERHVFDPARDAGLLSGANPVRRDVTMLPAFGWVVLAFRADNPGAWLFHCHIAWHVSGGLGVVYLERADDLRGAVSDADADDLDRLCADWRRYWPTNPYPKSDSGLKHRWVEEGEWLVKA

SEQ ID NO: 10 - protein, 714 aa, unidentified
QCPYLSGEMSFTQEQDNAGDTIEVTEQTIDNTLYVNDTGSYMTTDFGTPISDQYSLKAGRRGPTLLEDFIFRQKLQRFDHERVPERVVHARGAGAYGTFKSYADWSNVTAADFLSANEKETPMFCRFSTVVGFRGSVDTARDVHGHACRFYTDEGNYDIVGINFAPFFIQDAIQFPDLVHAIKPMPNNEIPQAATAHTSAWDFFSQQSTALHSALWLMSGNGIPRSFRHMNGYGVHSFRFVAANGTSKVVRYRWKSQQGVASLVWEEAQAAAGKNSDYHRQDLYNAIANGHYPKYELQAQIMDEADMLRFGFDLLDPTKLVPEEVVPYTPLGMMELNANPTNYFAEVEQAGFQPGHVVPGIDFTDDPLLQGRLFSYLDTQLTRHGGPNFEQIPVNRPRKPVHNNNRDGFGQQQIPTNNWAYTPNTMSNGYPMQANQTHGHGFFTSPYRYASGHLIREPSPTFHDHWSQPAMFWNSLIPAEQQMVVNAIVFENSKVNSPHVRKNVVNQLNMVNNNLAVRVARGLGLDEPSPNPTYYTSNKTSNVGTFGKPLLSIEGLQVGFLASNSHPESIKQGQAMAAQFSAAGVDLNIVTEAYADGVNTTYALSDAIDFDALIIADGVQSLFASPSLANQMNSTATSTLYPPARPYQILVDSFRYGKPVAAVGSGSAALKNAGIDTSRSGVYTGSSETTENIAKEVLKGLYTFRFVDRFALDE

SEQ ID NO: 11 - protein, 724 aa, Thermoascus aurantiacus
ACPYMTGELPRSFAENPHAINRRAEGGGGAAAETEKFLSQFYLNDNDTFMTTDVGGPIEDQNSLSAGDRGPTLLEDFILRQKIQRFDHERVPERAVHARGAGAHGVFTSYADWSNITAASFLSAAGKETPVFVRFSTVAGSRGSADTARDVHGFATRFYTDEGNFDIVGNNIPVFFIQDAIQFPDLIHAVKPSPNNEIPQAATAHDSAWDFFSQQPSSLHTLFWAMAGHGIPRSYRNMDGFGIHTFRFVTDDGASKLVKFHWTSLQGKASLVWEEAQAVAGKNADYHRQDLWDAIEAGRYPEWELGVQIMDEEDQLRFGFDLLDPTKIVPEEYVPITKLGKMQLNRNPLNYFAETEQIMFQPGHVVRGIDFTEDPLLQGRLFSYLDTQLNRHGGPNFEQIPINRPRTPIHNNNRDGAAQMYIPLNKAAYTPNTLNNGSPKQANQTVGKGFFTTPGRTASGRLVRAVSSTFADVWSQPRLFYNSLVPAEQQFLINAIRFETAHITSDVVKNNVIIQLNRVSNNLAKRVARAIGVAEPEPDPTLYHNNKTANVGVFGKPLARLDGLQVGVLATVNKPDSIKQAASLKASFAADNVDVKVVAERLADGVDETYSAADAVNFDAILVANGAEGLFARDSFTARPANSTTATLYPAGRPLQILVDGFRYGKPVGALGSGAKALDAAEISTTRAGVYVANSTTDSFINGVRDGLRTFKFLDRFAIDEDAE

SEQ ID NO: 12 - protein, 363 aa, Coprinopsis cinerea
MKLSLLSTFAAVIIGALALPQGPGGGGSVTCPGGQSTSNSQCCVWFDVLDDLQTNFYQGSKCESPVRKILRIVFHDAIGFSPALTAAGQFGGGGADGSIIAHSNIELAFPANGGLTDTVEALRAVGINHGVSFGDLIQFATAVGMSNCPGSPRLEFLTGRSNSSQPSPPSLIPGPGNTVTAILDRMGDAGFSPDEVVDLLAAHSLASQEGLNSAIFRSPLDSTPQVFDTQFYIETLLKGTTQPGPSLGFAEELSPFPGEFRMRSDALLARDSRTACRWQSMTSSNEVMGQRYRAAMAKMSVLGFDRNALTDCSDVIPSAVSNNAAPVIPGGLTVDDIEVSCPSEPFPEIATASGPLPSLAPAP

SEQ ID NO: 13 - protein, 610 aa, Aspergillus niger
MKLPLFAAAAAGLANAASLPVERAEAEVASVAADLIVRALPNAPDGYTPSNVTCPSTRPSIRDASGISTNETEWLKVRRNATLTPMKNLLSRLNLTGFDTTSYINEHSSNISNIPNIAIAASGGGYRALTNGAGALKAFDSRSDNATNSGQLGGLLQAATYVSGLSGGSWLVGSMFVNNFSSIGELQASEKVWRFDKSLLEGPNFDHIQIVSTVEYWKDITEEVDGKANAGFNTSFTDYWGRALSYQLVNASDDKGGPDYTWSSIALMDDFKNGQYPMPIVVADGRNPGEIIVETNATVYEVNPWEFGSFDPSVYAFAPLQYLGSRFENGSIPDNGTCVSGFDNAGFIMGSSSTLFNQFLLQINSTSIPTILKDAFTDILEDLGERNDDIAVYSPNPFSGYRDSSEDYATAKDLDVVDGGEDGENIPLHPLIQPERAVDVIFAIDSSADTDYYWPNGTSLVATYERSLEPSIANGTAFPAVPDQNTFVNLGLNSRPTFFGCDPKNISGTAPLVIYLPNSPYTYDSNFSTFKLTYSDEERDSVITNGWNVVTRGNGTVDDNFPSCVACAILQRSTYRTNTSLPDICTTCFNDYCWNGTTNSTTPGAYEPSV

SEQ ID NO: 14 - protein, 540 aa, unidentified
MKQQKRLYARLLTLLFALIFLLPHSAAAAPFNGTMMQYFEWYLPDDGTLWTKVANEANNLSSLGITALWLPPAYKGTSRSDVGYGVYDLYDLGEFNQKGTVRTKYGTKAQYLQAIQAAHAAGMQVYADVVFDHKGGADGTEWVDAVEVNPSDRNQEISGTYQIQAWTKFDFPGRGNTYSSFKWRWYHFDGVDWDESRKLSRIYKFRGKAWDWEVDTEFGNYDYLMYADLDMDHPEVVTELKNWGKWYVNTTNIDGFRLDAVKHIKFSFFPDWLSYVRSQTGKPLFTVGEYWSYDINKLHNYITKTDGTMSLFDAPLHNKFYTASKSGGAFDMRTLMTNTLMKDQPTLAVTFVDNHDTEPGQALQSWVDPWFKPLAYAFILTRQEGYPCVFYGDYYGIPQYNIPSLKSKIDPLLIARRDYAYGTQHDYLDHSDIIGWTREGGTEKPGSGLAALITDGPGGSKWMYVGKQHAGKVFYDLTGNRSDTVTINSDGWGEFKVNGGSVSVWVPRKTTVSTIARPITTRPWTGEFVRWTEPRLVAWP

SEQ ID NO: 15 - protein, 483 aa, Sutcliffiella halmapala
HHNGTNGTMMQYFEWHLPNDGNHWNRLRDDASNLRNRGITAIWIPPAWKGTSQNDVGYGAYDLYDLGEFNQKGTVRTKYGTRSQLESAIHALKNNGVQVYGDVVMNHKGGADATENVLAVEVNPNNRNQEISGDYTIEAWTKFDFPGRGNTYSDFKWRWYHFDGVDWDQSRQFQNRIYKFRGKAWDWEVDSENGNYDYLMYADVDMDHPEVVNELRRWGEWYTNTLNLDGFRIDAVKHIKYSFTRDWLTHVRNATGKEMFAVAEFWKNDLGALENYLNKTNWNHSVFDVPLHYNLYNASNSGGNYDMAKLLNGTVVQKHPMHAVTFVDNHDSQPGESLESFVQEWFKPLAYALILTREQGYPSVFYGDYYGIPTHSVPAMKAKIDPILEARQNFAYGTQHDYFDHHNIIGWTREGNTTHPNSGLATIMSDGPGGEKWMYVGQNKAGQVWHDITGNKPGTVTINADGWANFSVNGGSVSIWVKR

SEQ ID NO: 16 - protein, 483 aa, Bacillus amyloliquefaciens
VNGTLMQYFEWYTPNDGQHWKRLQNDAEHLSDIGITAVWIPPAYKGLSQSDNGYGPYDLYDLGEFQQKGTVRTKYGTKSELQDAIGSLHSRNVQVYGDVVLNHKAGADATEDVTAVEVNPANRNQETSEEYQIKAWTDFRFPGRGNTYSDFKWHWYHFDGADWDESRKISRIFKFRGEGKAWDWEVSSENGNYDYLMYADVDYDHPDVVAETKKWGIWYANELSLDGFRIDAAKHIKFSFLRDWVQAVRQATGKEMFTVAEYWQNNAGKLENYLNKTSFNQSVFDVPLHFNLQAASSQGGGYDMRRLLDGTVVSRHPEKAVTFVENHDTQPGQSLESTVQTWFKPLAYAFILTRESGYPQVFYGDMYGTKGTSPKEIPSLKDNIEPILKARKEYAYGPQHDYIDHPDVIGWTREGDSSAAKSGLAALITDGPGGSKRMYAGLKNAGETWYDITGNRSDTVKIGSDGWGEFHVNDGSVSIYVQK

SEQ ID NO: 17 - protein, 640 aa, Aspergillus niger
MSFRSLLALSGLVCTGLANVISKRATLDSWLSNEATVARTAILNNIGADGAWVSGADSGIVVASPSTDNPDYFYTWTRDSGLVLKTLVDLFRNGDTSLLSTIENYISAQAIVQGISNPSGDLSSGAGLGEPKFNVDETAYTGSWGRPQRDGPALRATAMIGFGQWLLDNGYTSTATDIVWPLVRNDLSYVAQYWNQTGYDLWEEVNGSSFFTIAVQHRALVEGSAFATAVGSSCSWCDSQAPEILCYLQSFWTGSFILANFDSSRSGKDANTLLGSIHTFDPEAACDDSTFQPCSPRALANHKEVVDSFRSIYTLNDGLSDSEAVAVGRYPEDTYYNGNPWFLCTLAAAEQLYDALYQWDKQGSLEVTDVSLDFFKALYSDAATGTYSSSSSTYSSIVDAVKTFADGFVSIVETHAASNGSMSEQYDKSDGEQLSARDLTWSYAALLTANNRRNSVVPASWGETSASSVPGTCAATSAIGTYSSVTVTSWPSIVATGGTTTTATPTGSGSVTSTSKTTATASKTSTSTSSTSCTTPTAVAVTFDLTATTTYGENIYLVGSISQLGDWETSDGIALSADKYTSSDPLWYVTVTLPAGESFEYKFIRIESDDSVEWESDPNREYTVPQACGTSTATVTDTWR

SEQ ID NO: 18 - protein, 616 aa, Aspergillus niger
ATLDSWLSNEATVARTAILNNIGADGAWVSGADSGIVVASPSTDNPDYFYTWTRDSGLVLKTLVDLFRNGDTSLLSTIENYISAQAIVQGISNPSGDLSSGAGLGEPKFNVDETAYTGSWGRPQRDGPALRATAMIGFGQWLLDNGYTSTATDIVWPLVRNDLSYVAQYWNQTGYDLWEEVNGSSFFTIAVQHRALVEGSAFATAVGSSCSWCDSQAPEILCYLQSFWTGSFILANFDSSRSGKDANTLLGSIHTFDPEAACDDSTFQPCSPRALANHKEVVDSFRSIYTLNDGLSDSEAVAVGRYPEDTYYNGNPWFLCTLAAAEQLYDALYQWDKQGSLEVTDVSLDFFKALYSDAATGTYSSSSSTYSSIVDAVKTFADGFVSIVETHAASNGSMSEQYDKSDGEQLSARDLTWSYAALLTANNRRNSVVPASWGETSASSVPGTCAATSAIGTYSSVTVTSWPSIVATGGTTTTATPTGSGSVTSTSKTTATASKTSTSTSSTSCTTPTAVAVTFDLTATTTYGENIYLVGSISQLGDWETSDGIALSADKYTSSDPLWYVTVTLPAGESFEYKFIRIESDDSVEWESDPNREYTVPQACGTSTATVTDTWR

SEQ ID NO: 19 - protein, 435 aa, Humicola insolens
MARGTALLGLTALLLGLVNGQKPGETKEVHPQLTTFRCTKRGGCKPATNFIVLDSLSHPIHRAEGLGPGGCGDWGNPPPKDVCPDVESCAKNCIMEGIPDYSQYGVTTNGTSLRLQHILPDGRVPSPRVYLLDKTKRRYEMLHLTGFEFTFDVDATKLPCGMNSALYLSEMHPTGAKSKYNPGGAYYGTGYCDAQCFVTPFINGLGNIEGKGSCCNEMDIWEANSRASHVAPHTCNKKGLYLCEGEECAFEGVCDKNGCGWNNYRVNVTDYYGRGEEFKVNTLKPFTVVTQFLANRRGKLEKIHRFYVQDGKVIESFYTNKEGVPYTNMIDDEFCEATGSRKYMELGATQGMGEALTRGMVLAMSIWWDQGGNMEWLDHGEAGPCAKGEGAPSNIVQVEPFPEVTYTNLRWGEIGSTYQEVQKPKPKPGHGPRSD

SEQ ID NO: 20 - protein, 203 aa, Bacillus amyloliquefaciens
FNSYNSGLWQKADGYSNGDMFNCTWRANNVSMTSSGEMRLALTSPSYNKFDCGENRSVQTYGYGLYEVRMKPAKNTGIVSSFFTYTGPTEGTPWDEIDIEFLGKDTTKVQFNYYTNGAGNHEKLADLGFDAANAYHTYAFDWQPNSIKWYVDGQLKHTATTQIPAAPGKIMMNLWNGTGVDDWLGSYNGVNPLYAHYDWVRYT

SEQ ID NO: 21 - protein, 406 aa, Aspergillus niger
MVGLLSITAALAATVLPNIVSAVGLDQAAVAKGLQYFGTATDNPELTDIPYVTQLNNTADFGQITPGNSMKWDATEPSQGTFTFTKGDVIADLAEGNGQYLRCHTLVWYNQLPSWVTSGTWTNATLTAALKNHITNVVSHYKGKCLHWDVVNEALNDDGTYRTNIFYTTIGEAYIPIAFAAAAAADPDAKLFYNDYNLEYGGAKAASARAIVQLVKNAGAKIDGVGLQAHFSVGTVPSTSSLVSVLQSFTALGVEVAYTEADVRILLPTTATTLAQQSSDFQALVQSCVQTTGCVGFTIWDWTDKYSWVPSTFSGYGAALPWDENLVKKPAYNGLLAGMGVTVTTTTTTTTATATGKTTTTTTGATSTGTTAAHWGQCGGLNWSGPTACATGYTCTYVNDYYSQCL

SEQ ID NO: 22 - protein, 204 aa, Dictyoglomus thermophilum
MQTSITLTSNASGTFDGYYYELWKDTGNTTMTVYTQGRFSCQWSNINNALFRTGKKYNQNWQSLGTIRITYSATYNPNGNSYLCIYGWSTNPLVEFYIVESWGNWRPPGATSLGQVTIDGGTYDIYRTTRVNQPSIVGTATFDQYWSVRTSKRTSGTVTVTDHFRAWANRGLNLGTIDQITLCVEGYQSSGSANITQNTFSQGS

SEQ ID NO: 23 - protein, 225 aa, Thermomyces lanuginosus
MVGFTPVALAALAATGALAFPAGNATELEKRQTTPNSEGWHDGYYYSWWSDGGAQATYTNLEGGTYEISWGDGGNLVGGKGWNPGLNARAIHFEGVYQPNGNSYLAVYGWTRNPLVEYYIVENFGTYDPSSGATDLGTVECDGSIYRLGKTTRVNAPSIDGTQTFDQYWSVRQDKRTSGTVQTGCHFDAWARAGLNVNGDHYYQIVATEGYFSSGYARITVADVG

SEQ ID NO: 24 - protein, 206 aa, Bacillus agaradhaerens
QIVTDNSIGNHDGYDYEFWKDSGGSGTMILNHGGTFSAQWNNVNNILFRKGKKFNETQTHQQVGNMSINYGANFQPNGNAYLCVYGWTVDPLVEYYIVDSWGNWRPPGATPKGTITVDGGTYDIYETLRVNQPSIKGIATFKQYWSVRRSKRTSGTISVSNHFRAWENLGMNMGKMYEVALTVEGYQSSGSANVYSNTLRINGNPL

SEQ ID NO: 25 - protein, 576 aa, unidentified
IRQRAGNHTVCNSQLCTWWHDNGEINTASMVQLGNVRQSHKYLVQVSIAGVNDFYDSFAYESIPRNGRGRIYSPWDPPNSDTLGSDVDDGITIETSAGINMAWSQFEYSTGVDVKILTRDGSRLPDPSGVKIRPTAISYDIRSSSDGGIVIRVPHDPNGRRFSVEFDNDLYTYRSDGSRYVSSGGSIVGVEPRNALVIFASPFLPDNMVPRIDGPDTKVMTPGPINQGDWGSSGILYFPPGVYWMNSNQQGQTPKIGENHIRLHPNTYWAYLAPGAYVKGAIEYSTKSDFYATGHGVLSGEHYVYQANPATYYQALKSDATSLRMWWHNNLGGGQTWYCQGPTINAPPFNTMDFHGSSDITTRISDYKQVGAFFFQTDGPQMYPNSQVHDVFYHVNDDAIKTYYSGVTVTRATIWKAHNDPIIQMGWDTRDVTGVTLQDLYIIHTRYIKSETYVPSAIIGASPFYMPGRSVDPAKSISMTISNLVCEGLCPALMRITPLQNYRDFRIQNVAFPDGLQANSIGTGKSIVPASSGLKFGVAISNWTVGGEQVTMSNFQSDSLGQLDIDVSYWGQWVIR

SEQ ID NO: 26 - protein, 208 aa, Sodiomyces alcalophilus
RIPGFDISGWQPTTDFARAYANGDRFVYIKATEGTTFKSSAFSRQYTGATQNGFIRGAYHFAQPAASSGAAQARYFASNGGGWSKDGITLPGALDIEYNPNGATCYGLSQSAMVNWIEDFVTTYHGITSRWPVIYTTTDWWTQCTGNSNRFANRCPLWIARYASSVGTLPNGWGFYTFWQYNDKYPQGGDSNWFNGDASRLRALANGD

SEQ ID NO: 27 - protein, 756 aa, Trichoderma atroviride
MKSLTAVVALLGAVAASPAVVRHHGRSALQPRANSSFWYAAMDHTGQFKGSAPYVDASYNVFVAVSPGDAGSLQNAIDSAGSGNRQNEWLASQPRVVYIPSGTYELSSTLNMRTDTILFGDATNPPVIKAAAGFSDNYLVNGQDPSTGDAGELSFAVGLKNVVLDTTAVDGSSSISALYWGVAQACQLQNVKITLAPSVNGKGHTGVQLGRGSTLALADIRIENGQTGIWHNGHQQALYKSIYFYKNTVGMLISGGNTISLLNPTFDSVGTGVSNTGGSPFIGIVDATSINSGVTFTTSVYPSIVIDNLTKDTDSDVAVIRGTTTVGASKNVVNYSYGNTVGANPVYGGVNGNTTRPSGVAPGGRIPAVAVPNYANNPVTDFVNVKDPSQNGGQTVKGDGSTDDSAALNKVLQFAATNNKIAYFPFGDYRVESTLLVPVGSQLVGEAWATISGGGDFFKDASSPKPVVQVGNEGDVGVAQIQDFRFTVSDVLPGAIIVQFNAAGSKPGDVALFNSLVTVGGTHGADALTNACTDASNECQAAFLGLHFTEGSSAYVENTWNWVADHITEGFSGGSNIAAKGGALVESTKGTWLNGLGSEHWWLYQLNLKAASNVAVTLLQSETNYDQGDNTKQVPPAPWTADVQGWGDPDFSWCDSTARCHMGLANYVNGGSDIYYYGSASWAFFSGPGYQGCAGSYQCQDYMHFISATPTNLQMYGMCSKDTSVALRLGDGTKINAQPDFTGGWSPGADIGRYTS

SEQ ID NO: 28 - protein, 450 aa, Trichoderma harzianum
MKLLPSLIGLASLASLAVAAPSLIPRVSPFSIAKPGGVDDIVITANNTLNGTYHSSTTVSKNVIQTRAQAGHLPIQLVNNFSGSQVNAYISGLDTDNRVVFVRGDGSLVYPSSGGSSVPVAISTPINIALPAQGQSITVNVPIVISSARIYFSVGDLQFFMVKIPNGDGLVQPSQFNLQDPSAGLLWGFVELTYTTDLAVYANISYVDFVGMILSMSLSATDGSATQTTKGLGSSALTQICQGLVQQASVDGFPWSSMCIANSAGTLVRALSPGDYSVINAAAFQNYWSAYVDQVWSQYTNTPLTINTQTSAGSVNCQVSGDTLNCNGDNRGYAKPAAGDIWGCNSGPFAIQSGDNAVHSAVVPRLCAAFVRSTLLLAGGNVQPGLGQSSYYTVSPTNHYSRLVHQFEIDGRGYAFPYDDVNPDGNENASGTLASGAPNVLTVYVGAPPS

SEQ ID NO: 29 - protein, 957 aa, Bacillus deramificans
MAKKLIYVCLSVCLVLTWAFNVKGQSAHADGSTTTIIVHYFRPAGDYQPWSLWMWPEGGSGAEYDFNGTDSYGEVANVSIPGNPSQVGIIVRTQDWTKDVSADRYIDLSKGHEVWLVQGNSQIFYNEKDAEDAAKPAVSNAYLDASNQVLVKLSQPFTLGEGASGFTVHDDTVNKDIPVTSVTDASLGQNVTAVLAGTFQHIFGGSDWAPDNHSTLLKKVNNNLYQFSGDLPEGNYQYKVALNDSWNNPSYPSNNIDLTVPTGGAHVTFSYVPSTHAVYDSINNPGADLPVNGSGVKTDLVTVTLGEDPDVSHTLSIQTDGYQAKQVISRNVLDSSQYYYSGDDLGNTYTHKATTFKVWAPTSTQVNVLLYNSATGSVTKTVPMTASGHGVWEATVNQNLENWYYMYEVTGQGSTRTAVDPYATAIAPNGTRGMIVDLAKTDPAGWNSDKHITPKNIEDEVIYEMDVRDFSIDPNSGMKNKGKYLALTEKGTKGPDNVKTGIDSLKQLGITHVQLMPVFAFNSVDETDPTQDNWGYDPRNYDVPEGQYATNANGTARIKEFKEMVLSLHREHIGVNMDVVYNHTFATQISDFDKIVPEYYYRTDDAGNYTNGSGTGNEIAAERPMVQKFIIDSLKYWVNEYHIDGFRFDLMALLGKDTMSKAASELHAINPGIALYGEPWTGGTSALPEDQLLTKGAQKGMGVAVFNDNLRNALDGNVFDSSAQGFATGATGLTDAIKNGVEGSINDFTSSPGETINYVTSHDNYTLWDKIALSNPNDSEADRIKMDELAQAVVMTSQGVPFMQGGEEMLRTKGGNDNSYNAGDTVNEFDWSRKAQYPDVFNYYSGLIHLRLDHPAFRMTTANEINSHLQFLNSPENTVAYELTDHVNKDKWGNIIVVYNPNKTAATINLPSGKWAINATSGKVGESTLGQAEGSVQVPGISMMILHQEVSPDHGKK

SEQ ID NO: 30 - protein, 625 aa, Clonostachys rosea
MLFKTAFLGLIATVNFVHGAAIGHAAEQTSLEKRAEAADRLVFCHFMIGIVGNRNSASQYDDDMRRAKAAGIDAFALNIGVDGYTDAQLDLAYKSAADNDMKVFISFDFNWFKTGEAATVGQKIAKYANQAAQLKVDNRVFASSFAGDGLDVAAMKNAAGVDVFFVPNFHPEQTANPDSIDGGFNWMAWPNDGNNKAPKPGSSISVEDGDNKYLSWLGTKPYMAPISPWFFTHFGPEVSFSKNWVFPGGALIFDRWNQILDKGFPLVEMITWNDYGESHHFGPLSSPHYDDGNSKWTNDLPHNGWLELSKPFIAAYKAKEKAVDKYITGDQIVYWYRRTLKGLDCDATDTTAGRPANNDSGNYFMGRPDGWELMDDVVYVATLLKEAGTLTVNSGGQSVEKEVPAGANLIQVPAAVGSQTFSLSRNGKVVLEDKSLMDISNICPCGLYNFNPYVGTVPPGESDPLQPDGLASLTIGLHVSTCQATPSLGTNPPISTTGGSPPPSSTGSSPPPSTTAGPTSTGGSVPSQTSSVPAPTSTGSSQPCNGGTNADGESGNYSGLCSFACSYGYCPPGPCKCTSNGTPGNPPSGDGRNGCPADGLGDGYKGLCSFACSHGYCPDTACKYC

SEQ ID NO: 31 - protein, 408 aa, Trichoderma atroviride
MLSAYAFSLLVASASAWTPQSNAKVFSRDTEGVMRWLPGNDKFRGVNLGSQFIIEPWMASDEFSGMGCGGLNDEWSCVQSLGQDAADAAFQKHWDSWITQDDITQIKNLGLNTVRIPVGFWIREDLVQQGEFFPRGGIQYLDRLVGWCNDAGIYVIMDLHGGPGAQFPNQQYTGHGVSQPGFYTEANYERAANFLEWMTERIHTNATYASVGMLEVINEPVHSGDFPSQAADMVNTYYPLAWNRIRDTESKLGVSDDKRLHIQFMASAWGSGDPTSALPSTDFAAFDDHRYLKWDTSVTATKDGYLNAACSDKRDDNVIVGEWSISVADNVQDNDELGIKNRSDQADWYQKFWAAQVLAFEKSAGWVFWTWKCNWITGYDDWRWCYQSAVAAGAIPKDAGSAASINPC

SEQ ID NO: 32 - protein, 727 aa, unidentified
ATSFYYPNMDHVNAPRGFAPDLDGDFNYPIYQTVNAGDGNALQNAITTDGKGGSRHPQWFASQPRVVYIPPGTYTISKTLRFNTDTILMGDPTNPPIIKAAAGFSGDQTLISAQDPSTNEKGELSFAVAIKNVVLDTTAIPGGNSFTALWWGVAQAAHLQNVRITMSSSSGGNGHTGIRMGRGSTLGLADVRVERGQNGIWIDGHQQASFHNIYFFQNTIGMLISGGNTFSIFSSTFDTCGTGISNTGGSPWIALIDAKSINSGVTFTTNQFPSFMIENLTKDNGTPVVVVRGSTLVGASSHVNTYSYGNTVGRNPTYGDVTSSNTRPGALAPGGRYPYVAPPTYGDLPISSFLNVKDPAQNGGRTVKGDNTIDEAATLNAILELAASQNKVAYFPFGKYRVDSTLFIPKGSRIVGEAWATITGNGNFFKNENSPQPVVSVGRAGDVGIAQIQDMRFTVNDVLSGAIVVQFNMAGNNPGDVALWNSLVTVGGTRGASALANACTNNSNECKGAFIGIHVAKGSSPYIQNVWNWVADHIAENFSGGTSIAGKGGILVQSTKATWLYAIGSEHWWLYQLNLHNAANVVVSLLQAETNYHQGANTQQIPPAPWVANIGTWGDPDFAWCNGGDKRCRMGPANFINGGSNIYTYASAAWAFFSGPGQGCAQFECQQTMHWIASTPSNLQAFGLCSKDSVNTLRLGDGTFINTQNGYTGGWTPGGGDVGRYTT

SEQ ID NO: 33 - protein, 361 aa, Alkalihalobacillus bogoriensis
MKNLLIAFLLILFVTGCAEPEQQQTEEATDNIEETQEELEVNEEPIVIADNLDIPWSIEKAGDTFYITERGGHIVKVENGAMERQTVHLEQELSSVPEAGLLGFVLNPNFPDTNLAYAYYTYEKNADPYNRIVTLRYENDQWQEENILLDNIPSGTYHHGGRLKIGPDGFLYATTGDASIPEIAQDIDSLGGKIIRVELDGAIPEDNPFANSSIYSFGHRNPQGLTWAIDGSFYSSEHGSSANDEINEIEPGLNYGWPIIQGDEEREGMVSPLFTSGNESTWAPSGMDYYNNRLYVAALRGAAIIEFNLETGEHQEIITDLGRIRDIKIEDDTLYFISNNTDGRGNPEEDDDKLYRLSLQE

SEQ ID NO: 34 - protein, 390 aa, Talaromyces pinophilus
MTFKTSYLASALLLLTARASAQTANAEAAFATLQEWYDPVTGLWNTAGWWNGANAMTVIAELAAVDASIVQDAISIFETTFSVAPSVNPSNGVEKSVGTNGLIQTTYPAGWPNNTISKRAIQDSTDPTVWLDGANDDAEWWGLAWVAAYDVTGNETYLNLAEGIFNEIAAGWGTNCGNGGIYWETTNHYVNAIASELFISLAAHLANRVPANAATYTAWAEEAWNWFASTGMINANGTINDGLTTDCVNNGQPVWSYNQGVILGGLTELNKISPNESYIESANSIAQAAIAALADSNYVIHDYACEPSDCEPNGTQFKGIFMRNLLLLQRASPNDLYSKVIEACAASIWANDRDTTTGELGVNWAGPFVGGDATTQSSAMGALVAAISVE

SEQ ID NO: 35 - protein, 317 aa, Fusarium solani
MVAFSRIAVTTLALGGSTAQAKPATAARATGLADFKPGVQWEICIHHPIKHDSAADLIPTKAKVWDIDMGHAQEFPNMIPMLKSAGKFVICYFNAGALQDWDDDKSKFPKEVIGHSLSYPYDSEEWYLDIRDSRVLELQTARLDIAAKIGCDAVDPDNVDAWQQDDEDPTGFKLKSSDYTNYLKNLAKYAHSIKTKDGQPLLVGQKNAPEIAEDLVSTLDFAVLESCRGNSDPNEESWPFCEDFQTYIDAGKPVLQIEYPPSVEKTGKVSASDNKYYCTAEDEDKGFSKIIKWASAQLDGWGQYCGEEPFRTPAAKY

SEQ ID NO: 36 - protein, 248 aa, Ostropa barbara
MVLPSSILLPLYIYPSASTPSPWQPLYDSLGTHSNIHFDIIINPGSGPLLVPPTDIQLSDYMPAIAKLRTYKNVDLLGYVHTSWGLASQSDLLANISRYATWETVNGQDVHLDGLFFDEVVTAYDETDYDLLSTATTLARTTPNFKKIVFNPGQPADERYYALANYLTVFEGTAAAFDSSTVAALDVATRANSSVVIHDFTGTEAEQAILVNELVGLGLGSVDVTTLADYNDWSALWADFTGEVGDAV

SEQ ID NO: 37 - protein, 272 aa, Stenocarpella maydis
MHSFYLFPAVLAATAASATKILLPLYVYPTTGAGWTSIYNAIETHPSIDFQIVLNPSSGPGGSTPGYNTHWISAVSKLHSYDNVDTLGYVSAGYGSRDLDEITTDIKDWNQWNHYTGADITIDGIFFDETPNWNGTRGANDVSFMQQVTKLADRGGYTKVFNLGQACSHDEYFQIADTVVMFEGEAESYNSTVLDDVVESGVADRSAILIHHFEGSGLTSGFAVRWVIDLVNRGLGSFAIINTDWTQANSDVAPMGISILADMLESVLDHQY

SEQ ID NO: 38 - protein, 297 aa, Urnula craterium
MTSKILSLALATLNVAYAATTICSTKCPYTNLGSSDAVTKSDWWKPALGATWQVVLTPADDDAGPQLTDDYEVYDLDVFDVDASVFKSLQAKDKKVICYFSAGSYEDWREDCGCFKSSDLGSDLDGWEGEAWLNTDSQNVRNIMAARLDVAVEKGCNGVDPDNVDGYDNDNGLGLSESTAKSYLQFLSDEAHSRGLAIGLKNAGSIAADVVDSMEWEVNEECIAQENCEDYKTFVDAGKPVFNIEYPPEDHIDDAWTEAEIEERCAQKADASNGATKFSTVLKNHENVDEWIRTCSE

SEQ ID NO: 39 - protein, 267 aa, Bjerkandera fumosa
MFTFAKIFTTACSLAGLFGSTFGTGIIVPLYVWPGDPNVCSGWTPLFNVISTTPSLTFYVVINPNSGPGDPSTQPVDSYSTCIQQLKGAKSGSNLRVLGYVATGGGSSTTVVRDITTYSGWNAAYRPDGIFFDQGSTASSQVSTYAGWANQARQILGSSTYTIVNPGQPPQDNAYFNSFDQIVTREDFLAQFSPSQLSITPASPAAKQAVILTDAFTFPSSVVSQLVSGNHIGSLWVTDDTQANQQNPYDSLPSYLTTFVNAVVADN

SEQ ID NO: 40 - protein, 251 aa, Pseudoplectania vogesiaca
MSLSLSPVATTGVLLPLYIYPAPSTAWDPLYSAITNNPSVNFYVIINPDSGPGGDEFPASDYISAIQKLKTYDTVTPLGYVHTTFGDQTTSAVEANITKYKNWDTYSTTSPISVDGIFFDEAPSSAADVSYMTTLSSSAKTTFGTGRDFVVFNPGSIVDPGYFNAADAIVIFENTEATYSESVFSSQSGGTSRQKAAIIHDFTGSESEQTSVVEGMVNQQAGLVYITDQSSYNSFSGLWSSFVSALQAAIA

SEQ ID NO: 41 - protein, 686 aa, Effusibacillus pohliae
SSSASVKGDVIYQIIIDRFYDGDTTNNNPAKSYGLYDPTKSKWKMYWGGDLEGVRQKLPYLKQLGVTTIWLSPVLDNLDTLAGTDNTGYHGYWTRDFKQIEEHFGNWTTFDTLVNDAHQNGIKVIVDFVPNHSTPFKANDSTFAEGGALYNNGTYMGNYFDDATKGYFHHNGDISNWDDRYEAQWKNFTDPAGFSLADLSQENGTIAQYLTDAAVQLVAHGADGLRIDAVKHFNSGFSKSLADKLYQKKDIFLVGEWYGDDPGTANHLEKVRYANNSGVNVLDFDLNTVIRNVFGTFTQTMYDLNNMVNQTGNEYKYKENLITFIDNHDMSRFLSVNSNKANLHQALAFILTSRGTPSIYYGTEQYMAGGNDPYNRGMMPAFDTTTTAFKEVSTLAGLRRNNAAIQYGTTTQRWINNDVYIYERKFFNDVVLVAINRNTQSSYSISGLQTALPNGSYADYLSGLLGGNGISVSNGSVASFTLAPGAVSVWQYSTSASAPQIGSVAPNMGIPGNVVTIDGKGFGTTQGTVTFGGVTATVKSWTSNRIEVYVPNMAAGLTDVKVTAGGVSSNLYSYNILSGTQTSVVFTVKSAPPTNLGDKIYLTGNIPELGNWSTDTSGAVNNAQGPLLAPNYPDWFYVFSVPAGKTIQFKFFIKRADGTIQWENGSNHVATTPTGATGNITVTWQN

SEQ ID NO: 42 - protein, 188 aa, Nocardiopsis sp.
ADIIGGLAYTMGGRCSVGFAATNAAGQPGFVTAGHCGRVGTQVTIGNGRGVFEQSVFPGNDAAFVRGTSNFTLTNLVSRYNTGGYATVAGHNQAPIGSSVCRSGSTTGWHCGTIQARGQSVSYPEGTVTNMTRTTVCAEPGDSGGSYISGTQAQGVTSGGSGNCRTGGTTFYQEVTPMVNSWGVRLRT

SEQ ID NO: 43 - protein, 316 aa, Bacillus licheniformis
LVSKKSVKRGLITGLIGISIYSLGMHPAQAAPSPHTPVSSDPSYKAETSVTYDPNIKSDQYGLYSKAFTGTGKVNETKEKAEKKSPAKAPYSIKSVIGSDDRTRVTNTTAYPYRAIVHISSSIGSCTGWMIGPKTVATAGHCIYDTSSGSFAGTATVSPGRNGTSYPYGSVKSTRYFIPSGWRSGNTNYDYGAIELSEPIGNTVGYFGYSYTTSSLVGTTVTISGYPGDKTAGTQWQHSGPIAISETYKLQYAMDTYGGQSGSPVFEQSSSRTNCSGPCSLAVHTNGVYGGSSYNRGTRITKEVFDNLTNWKNSAQ

SEQ ID NO: 44 - protein, 274 aa, Bacillus sp.
AQTVPYGIPLIKADKVQAQGFKGANVKVAVLDTGIQASHPDLNVVGGASFVAGEAYNTDGNGHGTHVAGTVAALDNTTGVLGVAPSVSLYAVKVLNSSGSGSYSGIVSGIEWATTNGMDVINMSLGGASGSTAMKQAVDNAYARGVVVVAAAGNSGSSGNTNTIGYPAKYDSVIAVGAVDSNSNRASFSSVGAELEVMAPGAGVYSTYPTNTYATLNGTSMASPHVAGAAALILSKHPNLSASQVRNRLSSTATYLGSSFYYGKGLINVEAAAQ

SEQ ID NO: 45 - protein, 269 aa, Lederbergia lenta
AQSVPWGISRVQAPAAHNRGLTGSGVKVAVLDTGISTHPDLNIRGGASFVPGEPSTQDGNGHGTHVAGTIAALNNSIGVLGVAPSAELYAVKVLGASGSGSVSSIAQGLEWAGNNGMHVANLSLGSPSPSATLEQAVNSATSRGVLVVAASGNSGAGSISYPARYANAMAVGATDQNNNRASFSQYGAGLDIVAPGVNVQSTYPGSTYASLNGTSSATPHVAGAAALVKQKNPSWSNVQIRNHLKNTATSLGSTNLYGSGLVNAEAATR

SEQ ID NO: 46 - protein, 382 aa, Alkalihalobacillus clausii
MMRKKSFWLGMLTAFMLVFTMAFSDSASAAEEAKEKYLIGFNEQEAVSEFVEQVEANDEVAILSEEEEVEIELLHEFETIPVLSVELSPEDVDALELDPAISYIEEDAEVTTMAQSVPWGISRVQAPAAHNRGLTGSGVKVAVLDTGISTHPDLNIRGGASFVPGEPSTQDGNGHGTHVAGTIAALNNSIGVLGVAPSAELYAVKVLGASGSGSVSSIAQGLEWAGNNGMHVANLSLGSPSPSATLEQAVNSATSRGVLVVAASGNSGAGSISYPARYANAMAVGATDQNNNRASFSQYGAGLDIVAPGVNVQSTYPGSTYASLNGTSSATPHVAGAAALVKQKNPSWSNVQIRNHLKNTATSLGSTNLYGSGLVNAEAATR

SEQ ID NO: 47 - protein, 269 aa, Alkalihalobacillus clausii
AQSVPWGISRVQAPAAHNRGLTGSGVKVAVLDTGISTHPDLNIRGGASFVPGEPSTQDGNGHGTHAAGTIAALNNSIGVLGVAPSAELYAVKVLGASGSGSVSAIAQGLEWAGNNGMHVANLSLGSPSPSATLEQAVNSATSRGVLVVAASGNSGAGSISYPARYANAMAVGATDQNNNRASFSQYGAGLDIVAPGVNVQSTYPGSTYASLNGTSMATPHVAGAAALVKQKNPSWSNVQIRNHLKNTATSLGSTNLYGSGLVNAEAATR

SEQ ID NO: 48 - protein, 300 aa, Bacillus sp.
AATTGTGTTLKGKTVSLNISSESGKYVLRDLSKPTGTQIITYDLQNREYNLPGTLVSSTTNQFTTSSQRAAVDAHYNLGKVYDYFYQKFNRNSYDNKGGKIVSSVHYGSRYNNAAWIGDQMIYGDGDGILFSPLSGSLDVTAHEMTHGVTQETANLNYENQPGALNESFSDVFGYFNDTEDWDIGEDITISQPALRSLSNPTKYGQPDNFKNYKNLPNTPAGDYGGVHTNSGIPNKAAYNTITKIGVNKAEQIYYRALTVYLTPSSTFKDAKAALIQSARDLYGSQDAASVEAAWNAVGL

SEQ ID NO: 49 - DNA, 11137 bp, Aspergillus niger
  source 1..11137: mol_type = genomic DNA
gctgagggtttaatcctcacacaggaaacagctatgaccatgattacgccaagcttccgttaaattgccgtcgtcagccgttaaattaccgattaatcccgataaatttccgagatctccgttaaattgccgtcgttcaccgttaaattaccgaaatttaccgataaatttccggatctccgttaaattgccgttcgcagccgttaaattaccggggacgaccgataaatttccgcgatgaattcatggtgttttgatcattttaaatttttatatggcgggtggtgggcaactcgcttgcgcgggcaactcgcttaccgattacgttagggctgatatttacgtaaaaatcgtcaagggatgcaagaccaaaccgttaaatttccggagtcaacagcatccaagcccaagtccttcacggagaaaccccagcgtccacatcacgagcgaaggaccacctctaggcatcggacgcaccatccaattagaagcagcaaagcgaaacagcccaagaaaaaggtcggcccgtcggccttttctgcaacgctgatcacgggcagcgatccaaccaacaccctccagagtgactaggggcggaaatttatcgggattaatttccactcaaccacaaatcacagtcgtccccggtaatttaacggctgcagacggcaatttaacggcttctgcgaatcgcttggattccccgcccctggccgtagagcttaaagtatgtcccttgtcgatgcgatgtatcacaacatataaatactggcaagggatgccatgcttggagtttccaactcaatttacctctatccacacttctcttccttcctcaatcctctatatacacaactgggggcagtgagagcgatcaatcctctatatacacaactggggatccaccatgatgcagactctccttgtgagctcgcttgtggtctccctcgctgcggccctgccacactacatcaggagcaatggcattgaagccagcctcctgactgatcccaaggatgtctccggccgcacggtcgactacatcatcgctggtggaggtctgactggactcaccaccgctgctcgtctgacggagaaccccaacatcagtgtgctcgtcatcgaaagtggctcctacgagtcggacagaggtcctatcattgaggacctgaacgcctacggcgacatctttggcagcagtgtagaccacgcctacgagaccgtggagctcgctaccaacaatcaaaccgcgctgatccgctccggaaatggtctcggtggctctactctagtgaatggtggcacctggactcgcccccacaaggcacaggttgactcttgggagactgtctttggaaatgagggctggaactgggacaatgtggccgcctactccctccaggctgagcgtgctcgcgcaccaaatgccaaacagatcgctgctggccactacttcaacgcatcctgccatggtaccaatggtactgtccatgccggaccccgcgacaccggcgatgactattctcccatcgtcaaggctctcatgagcgctgtcgaagaccggggcgttcccaccaagaaagacttcggatgcggtgacccccatggtgtgtccatgttccccaacaccttgcacgaagaccaagtgcgctccgatgccgctcgcgaatggctacttcccaactaccaacgtcccaacctgcaagtcctgaccggacagtatgttggtaaggtgctccttagccagaacggcaccacccctcgtgccgttggcgtggaattcggcacccacaagggcaacacccacaacgtttacgctgagcacgaggtcctcctggccgcgggctccgctgtctctcccacaatcctcgaatattccggtatcggaatgaagtccatcctggagccccttggtatcgacaccgtcgttgacctgcccgtcggcttgaacctgcaggaccagaccaccgctaccgtccgctcccgcatcacctctgctggtgcaggacagggacaggccgcttggttcgccaccttcaacgagacctttggtgactattccgaaaaggcacacgagctgctcaacaccaagctggagcagtgggccgaagaggccgtcgcccgtggcggattccacaacaccaccgccttgctcatccagtacgagaactaccgcgactggattgtcaaccacaacgtcgcgtactcggaactcttcctcgacactgccggagtagccagcttcgatgtgtgggaccttctgcccttcacccgaggatacgttcacatcctcgacaaggacccctaccttcaccacttcgcctacgaccctcagtacttcctcaacgagctggacctgctcggtcaggctgccgctactcaactggcccgcaacatctccaactccggtgccatgcagacctacttcgctggggagactatccccggtgataacctcgcgtatgatgccgatttgagcgcctggactgagtacatcccgtaccacttccgtcctaactaccatggcgtgggtacttgctccatgatgccgaaggagatgggcggtgttgttgataatgctgcccgtgtgtatggtgtgcagggactgcgtgtcattgatggttctattcctcctacgcaaatgtcgtcccatgtcatgacggtgttctatgccatggcgctaaaaatttcggatgctatcttggaagattatgcttccatgcagtgatgatgcgcggcgcggctgggtatcgcagacactgctggcggtagacaatcaatccatttcgctatagttaaaggatggggatgagggcaattggttatatgatcatgtatgtagtgggtgtgcataatagtagtgaaatggaagccaagtcatgtgattgtaatcgaccgacggaattgaggatatccggaaatacagacaccgtgaaagccatggtctttccttcgtgtagaagaccagacagacagtccctgatttacccttgcacaaagcactagaaaattagcattccatccttctctgcttgctctgctgatatcactgtcattcaatgcatagccatgagctcatcttagatcctaagtcctcagcgtgatttaaaacgccattgctatgatgcttgaagagtgccggatatatcggcatctaacttaggatttgtcttacgtacaatatttatgacctgtggtgaaacctgaggcaacaagggggcgcgatttaccagactggcgttcacataccaatacagtgcttaattgtaggtctcatgggtggaatgagatgaccttccctttcatctattcttaagaggaacagggatggtacccacaccataccccgaagagctcgtgatgtaatagaccctttcgtagtatgcgggtttttattgagatgccgatatgcaaacttgtagtaagactaataataacaggtgcaattaattgaatttggggcctgttaagcttttcgtccgaccaccagtgacgtccgtccgataagccgggaacgatcgataaggaggctatcccgtcgatcctgactaaccttttccagttgttccttaactttgcaccatctccgcggaggaatccctgacccaatcttatggtgaggtgctatcgtccttatcaatccctgtcacgattgccgataacccgtccacatccgatcatggagattaccattgggtgtgtcgctgcatctgctgcgaaaccgcttcgatgaccatcaaccatgaggtgattcgatagtcaaacatctcgccacgacctcatggtgtccacggagatgagaggcccgatcctggatcttggcaccagtagggtcttgccatatcggatgatagatcatgggggacatactccttgataaataaaaacgtccgccaacaccgtgcgttgggcgttgaatctcttccacagtgctatccatcccggacacaatgcctctcctagaagcgcccaggaatgggggcgcagtcaacaatggcgtccttagcggggtgtcgcattctcagagctttggcattgacacagagagtcacttggatgaccctaacagacgccaacagatagtggtggtgggactgggaatggtggctatttccttcctgtaggtgcaccgaagggggacgaggcgatggtcaataatacagttcgggtactgacgataccccccttctccgtatagtgagaaactggtcaagcaagattcagagaggagaaagtacgatatcgttgtgatcggcgaagaacctcacgttgcttacaaccgagtcggcctttcctcgtttttcgaacatcgcaatatcgaggacctctacctcaacccgaaagaatgggtgagtatatcacagctttccctgcgaacttagtgcagcattcgtgctgacgtcaatggattaatccattagtacggatcgttcaaagatcgatcgttcgactatcatctgaacaccagagtaaccgatatatttcctgaccgcaagacggtaaaaacctcaacgggtgacataatcgcctacgatcttcttgttctcgctaccggctctgatgcggtgcttcccactcacactcccggctatgacgccaacggggtttttgtctacagaacgatatcggacctcgagcgccttatcgaatttgcctctaatcacaagggcgagacggcaactactgtcggaggtggcctgctgggactcgaagctgccaaagcaatgacggatctagaagatttcggcaaggtcaagctcattgaccgcaacaagtgggtgctagcaagacaactagacggcgatgccggtaccctagtgacgcggaaaatcagagaactgggcttggatgtgatgcaccagaagcgagtagcgaaaattaagacggatgacaacaacaatgtcacgggtatcgtctttgaggatggggaagaaatagattgctgctgcgtctgttttgctgtacgccgtctaatctcatctcacgtactttcagtttgctaacattacgtatagatcggagtacgacctagagacgagttggggacgactgctggtattcagtgcgcttcacggggtgggtttgttatcaatgaaaggtaacaaccatcgttatgttaagtcttctatcatctaatctgatcttatagtctgcaaacttcgattcccgagatttacgctatcggagagtgtgcaagctgggaaaaccagacgtttggtattattgcacctggcattgaaatggcagatgtgctagcgttcaatttgaccaatcccgataaggaaccaaggagcttcagaagaccggatttaagcactaagctgaagctcttgggagtggatgtcgccagttttggtgacttttttgcggatcgcgatggccccaagttcttgccaggccgtcgaccatcagtcgcaaccattccgcgggtgaaagacacgacggaaaaggagtcaccagtgaaggctctcacgtacaaggatccttttggtggtgtctataagaagtatctattcactatggacggcaaatacctacttggaggaatgatgatcggtgatacaaaggactatatcaaactgaaccaaatggtgaagagccaaaaagagctcgaagttcctccgagccagttcattctgggagctcaaaatggtggggaagaaaacggtgacgacctgtgagctttctctcagatgtccgtgtataacgggtctgctaactatcattcgtacagagccgacgatacccaagtttgctcgtgtcacaacgttaccaaaggtgacatcgtcgaaagtgtcaagagtggcacatgcaagtcaattggagaggtaaagtcatgcacaaaggcaggcactggctgtggaggctgtatgccgttagtgcaatcaattttcaataagaccatgcttgatatgggccaggaggtttcgaataactgtaggtatccttgagctgtttcctgtgtgaaattgttatccgctcacaattccacacaacatacgagccggaagcataaagtgtaaagcctggggtgcctaatgagtgagctaactcacattaattgcgttgcgctcactgcccgctttccagtcgggaaacctgtcgtgccagctgcattaatgaatcggccaacgcgcggggagaggcggtttgcgtattgggcgctcttccgcttcctcgctcactgactcgctgcgctcggtcgttcggctgcggcgagcggtatcagctcactcaaaggcggtaatacggttatccacagaatcaggggataacgcaggaaagaacatgtgagcaaaaggccagcaaaaggccaggaaccgtaaaaaggccgcgttgctggcgtttttccataggctccgcccccctgacgagcatcacaaaaatcgacgctcaagtcagaggtggcgaaacccgacaggactataaagataccaggcgtttccccctggaagctccctcgtgcgctctcctgttccgaccctgccgcttaccggatacctgtccgcctttctcccttcgggaagcgtggcgctttctcatagctcacgctgtaggtatctcagttcggtgtaggtcgttcgctccaagctgggctgtgtgcacgaaccccccgttcagcccgaccgctgcgccttatccggtaactatcgtcttgagtccaacccggtaagacacgacttatcgccactggcagcagccactggtaacaggattagcagagcgaggtatgtaggcggtgctacagagttcttgaagtggtggcctaactacggctacactagaaggacagtatttggtatctgcgctctgctgaagccagttaccttcggaaaaagagttggtagctcttgatccggcaaacaaaccaccgctggtagcggtggtttttttgtttgcaagcagcagattacgcgcagaaaaaaaggatctcaagaagatcctttgatcttttctacggggtctgacgctcagtggaacgaaaactcacgttaagggattttggtcatgagattatcaaaaaggatcttcacctagatccttttaaattaaaaatgaagttttaaatcaatctaaagtatatatgagtaaacttggtctgacagttaccaatgcttaatcagtgaggcacctatctcagcgatctgtctatttcgttcatccatagttgcctgactccccgtcgtgtagataactacgatacgggagggcttaccatctggccccagtgctgcaatgataccgcgagacccacgctcaccggctccagatttatcagcaataaaccagccagccggaagggccgagcgcagaagtggtcctgcaactttatccgcctccatccagtctattaattgttgccgggaagctagagtaagtagttcgccagttaatagtttgcgcaacgttgttgccattgctacaggcatcgtggtgtcacgctcgtcgtttggtatggcttcattcagctccggttcccaacgatcaaggcgagttacatgatcccccatgttgtgcaaaaaagcggttagctccttcggtcctccgatcgttgtcagaagtaagttggccgcagtgttatcactcatggttatggcagcgctgcataattctcttactgtcatgccatccgtaagatgcttttctgtgactggtgagtactcaaccaagtcattctgagaatagtgtatgcggcgaccgagttgctcttgcccggcgtcaatacgggataataccgcgccacatagcagaactttaaaagtgctcatcattggaaaacgttcttcggggcgaaaactctcaaggatcttaccgctgttgagatccagttcgatgtaacccactcgtgcacccaactgatcttcagcatcttttactttcaccagcgtttctgggtgagcaaaaacaggaaggcaaaatgccgcaaaaaagggaataagggcgacacggaaatgttgaatactcatactcttcctttttcaatattattgaagcatttatcagggttattgtctcatgagcggatacatatttgaatgtatttagaaaaataaacaaataggggttccgcgcacatttccccgaaaagtgccacctgacgtctaagaaaccattattatcatgacattaacctataaaaataggcgtatcacgaggccctttcgtctcgcgcgtttcggtgatgacggtgaaaacctctgacacatgcagctcccggagacggtcacagcttgtctgtaagcggatgccgggagcagacaagcccgtcagggcgcgtcagcgggtgttggcgggtgtcggggctggcttaaccagaccagcagaggagataatactctgcgctccgccagggtggccttcaagaaatgcttgaccatcatacacttctccattcacgatgaaccatggcttctcatcgcaggaattctccttgaattcttcaaaaccaatcactcggcttagcccgtctttcttcatattaatgtcttgcacgggctccggctccgtcggctcctctccttcgtgtctttctccccagttaccattcgtcaggtcacccccagcctttttgacgcgttccatccatcctgtaggcatactagggtgggtagggtgctcgaatctcaagttcccgttttccttcgtaattgtaacccggaaccacgggttgttcatcattccgagaacggaccagtacatatcgcgaggctgcacgcccaatgcttcgtccatggctcttacaaggatggcatcactgttctcaagctctgggatggtgatgcttagagaccaaaaacaccagcagaagcaagtttcgcgccagtacatatctactttgcctccaaaaagctcgccttcaaaatcacgatacttgtcttcggcatattcgatttccgccaatctccaagctataagtccgttagctttgataagcattctcacacatcgagcgagcgagggtgcgtacatttgcctttgtctagggatatttctaccctggtaaccctgcggcccccaccggcgtatgcatatcctctgacagtatatgacggccctgccgacaggagatttaagacctcattgttttggggatatgcaacggcggagttggtgtttaggtcataaatcgcataccgctcatcgtgccaccaatttcggttatttgatgccatctcaggcgagaccattgttctgggttagggagttagacaaatgatggaaatataaaataagtgccctttagacatacggtaagacgcggttgtcattgatatggtaccagttgtcgcttggtgcatcggtcaagatcagcctcttcagccacttaacacttcgtcctcctatttgaccgggcacgacggccctcagcggacgaccatgatctgggcgaagagactccccgttcattttatgtgcaagcatgatccccctgttggggtccagggcccagttcaatttaatagatgtgccgtagtgaccattgggctgcggcgaacttagcaattatcatcataagatagaggtacagcataccagcttatccgctccttccatacagacgtatttcgctttacgcaggggtttcgcactgcggagaatatccgccagcaatgggccagtgaagagggcagtcgatagtcccgccgatccccaggaaaaacctttcgttttacgtacaatgttttgctctttgcgtcgattgccagcacatacgagggtgataggcgctgttatttggtcgtactgctgcaacacttgtcggaagtttagtaccaaaggcttctctaccagtctatactttggttaacggatgtttggcagagaacctagcactatactaacccttcgatgctaatttcccagtgagggatatcttcatccttgatatgagggactgggccatgatttcgaacatagaagagctccggcgatgttaaaaaccctttcagagtgtgagaatgtaacggctcaaggggacaagcatgacagccggtgcaagcaacctgataaggataggagtggagcagttataactcataccttctttatacagatctgtgagaggtggctcaacattaaacggatgaacacccgttaatctgataagccgagggtcacgaggaacatggctatctggagttcctttatctacgctcagcacttctgtcggccgttttgatggcggtggcagagggatatcagacaggtctctcgtcgagatctcttcgctttcgattttgatctgacctgtcttaagaacgaggtcagttgggacgagcgcatccgtccgcacctcggtgatggttgccatgttaccggcagggaaggccaatgaaagtaaaattacgagggagggagcatgaacaaggatgctgagtatgaataagtcgaatggtcagccagtgcattaactccaaataaggaggcaatccaccacactaaaatactcttgcctatcgtatgatggcacgcagtacgtgttacccatgcgcgggcagtggacattctattaggtcacggcagtaactccttgttaccatataacgcctcggagaaaggtcacaataagcaatgctcctaggaacccaccagcgatttccgcggagtcccaaaatcagctcattctgggaggtgggacgctcgaaattagggcaagccttcaggctggacggcgtcccaccgcttaaccaagcgttgaggcaaataaatcgcgttgacccacacaacactctcgaggctccagccatttgtccgctcaaccttgcaggatttctttttcgtcatattaattggttctttgaagaatgatggagacaatgccgtgaagccatgtgcaacttccaattagaagtgttgttgcttatcgtccgaatgagcctggttcgcgtggagaatgggccagatgggagctcacggctgttagagcggagctactactctgtacgtacccttcaaaggaattctcggtaagtttgttagagggatattgctcacgtttaattggcactccaggatcctttaaatccaggcaaaaatcgctcgatctggctttttttgccaatcttggaagtctaccgtatacttgtagttacacccttgaggatttaccacatgagaagaacaccaacctaactgc

SEQ ID NO: 50 - DNA, 2824 bp, Aspergillus chevalieri
  source 1..2824: mol_type = genomic DNA
cccttttttacattccccacttcgttgtagagtgtatatcttgtatactatctcggtgccttttcggtgagattttgactctcaaggtttgtgggaaccatctattgtccacacgtgcgctatattcagcccgctcagcttctctcagggttgtaagcatcgatcttggcagagataggctcccgactctggacgagataggtcatcttggttcggagttgttggtaggatgggtgacacagcggtgcttatccgtactgtgattagctcgtcgtctcttgccgtaccaatttcatatggtcatagactcgttgtgaagaaagacccgaaagtctatataaggtgatatccgcctcgcatgagacctttcttctgccaggtctggttcgtctttccatcattagctttctctctctcctttgggcaacttgttgatttttcttttccccccttcttttgttctttttcattgttgttactccgtcgaccaatactttatcatgaagccactcctctggtctttgttcctctccgttgcgacagcactgcccaagttccctcgtgagcatcttggcgttgaacctcaactgctcaccgacccaaccgtgcttgccaacaccactgtcgattacatcattgctggtggtggcctgaccggcctgaccattgccgcacgcctgaccgaggaccctaacatcaaggtcttggtcatcgagagcggctacttcgaatcaaaccgcggtcccataatcgaagacctcaacagatacggtgaaatcttcgggactgaagtcgaccatgcattcgagactgtccaacttgccgtcaacaaccgtaccgagataattcgctccggtaatggcctcggaggttccacccttatcaacggtggtacctggactcgacctcacaaggtccaagtcgacagctgggagacggtctttggcaaccaaggctggaactgggatgatcttctcccgtatatgctcaagatcgagaaagcccgtcccccaaaccagaggcagattgaggctggtcattacttcaacccacagtgccacgggttcaacggtagcgttcatgctggaccccgtgataccggcgaaccttactctcctatcatgagggctctcatggatactgtcagcgcggagggcgtccctgttaggaaggacttgtgctgcggtgatcctcacggagtttccatgttcctcaatacgttgtacccaagccaaatccgtgccgatgctgcgcgcgagtatctggtccccaactactatcggcccaacttccaagttttgaccggccaaagggttggtaaagtgttgctggacaagaccgttcccggttctcccaaggcaattggtgttgagtttggaacgcacaggactcgcaagtatgaggcttatgctcgccgggaagttttgctggcggctggatcgaccatttcccccacaattctcgagtactcgggcattggtatgaagtctgttctcgactcggttggcattgagcaggtagtggagctgcctgttggtgttaaccttcaggaccaaaccaccgtccatgtagagtccagaatcaccccagctggtgccggtcagggtcaggctgcgtactttgccacgttcaacgagacattcggcgactttgctccccaggcacacgaactgctcaacacaaagctggaccaatgggccgaagaggtcgtggcccgaggcggcttcaacaatgcgacggcgctgaggatccagtacgaaaactaccgcaactggctggttaacgataacgtggccttttccgagctcttcctcgacacggctggcaaaattagctttgatgtgtgggacttgatccccttcactcgcggctatgttcacattgcggacaaggatccctacctccgccgcctgtacaacaaccctcagtacctcctaaacgagctcgacgtgctaggtgaggccgctgcttccaagctcgcccgtgagctctccagcaagggagccatggcgcagtactacgccggcgaaaccgtacccgggtttgaccatttgccagcggatgcgagcttgcgggactgggcgaagtacgtcaaggacagattccggcccaactaccacgccgtgagtacatgtgccatgatgtccaaggagcttggaggtgttgtagactcggcggcacgtgtgtatgatgttgagagattgcgagtggtagatggctctattcccccgacgcaggtgtcgtcgcacgtgatgactgtgttttatggtatggctgagaagatcgccgaggcgattttacaggattatcatgcgcgcaagtaaattgcaaagtgaacaagtattgtttactggtggttactgtatatagttagtgaattgattctcttaggggacttgatattcttttctgtcagcatcggaatcatcatccgacgccctacctgccatagaatcagagtttgagcaataatgtaggacccctgatggaccgccagtgagaatgagaagagagggaggaagaggagaagaagaagggagggaaaaagaaaacgtggaggtggggagatctgatacgcgtcccccgattaggcaaagccggatactaacccgaagaggagaatgagccgaatattccccggatgactgacgtgactgcatatggttactgtatagttatgactaggtaccggtacaggcacggtacatcaattcaatgtatataaacgttcaccacgaaagaggatatacagcccatccgagccaagacatacccgttaccgggaaggaacccgaaaactatccgaggctatcaatatccgggg

SEQ ID NO: 51 - DNA, 2818 bp, Penicillium viridicatum
  source 1..2818: mol_type = genomic DNA
ggtaaactacatgtatcctggtgcctttctgggcgccaagaaccttatctcgcaactgtaagcttccaaagttgtatcaatcatgaccaatgggactagcatgttgtctgcacgaggtctccctcaggtgcatgtgggtcgatggaattggccatgtgtatactctgatgtacttgggaacaaggcttcattgctgttgtcgacaggtccttatctcgtgaatgtaaaccttcaaagttgtattagtaatggccaatgatactagcatgtcgtctccacgaggtcctcctgaggtacatgcgggtcgatggatttggccatatgtatactatactatacttaggaacaaggtttcattgttgttatagaccggatgaaaatataaatatgttccaatcccatgtcctataccttccattcataccatttgataattctcctatccatccttttcatttcttttcggctttgtctttcaatcgccaaagccgccttttgagatgaagttactcggcgtcctgtccggccttggccttgttgtcgtggctacggcccttccactgcaggaattggatctccagtcgaccctgctcaccgacccaagaaaggtggccggcgaaactttcgactatgtcattgccggtggaggtttaactggcctgaccgtcgcagcgcgtcttactgagaaccccgacatcaacgttctcgtaatcgaaagtggcttctacgaatcgaacatcggccctatcattgaaaatctcaaccactatggtgatatcttcaccacatccgtcgaccaagccttcgaaacggttccgcttgctattcacaaccgcactgagattgttcgctccggcaaagggctgggaggttcgacattggtgaatggaggttcctggacacgtccacacaaggcgcagattaattcctgggagaaggtgttcggaatggaagggtggaactgggataatctactcccgtacatgaacaaggtcgaggcctcccgtccaccgaacgcagctcagattgctgctggacattactttgaccctgcctgccatggcgtcaatggtaccgtccaagtcggcccccgagacaccggagagagctactcgcccatgatcaaaagtcttatggagactgctaagaaatccggtgttcccgttcagaaggatttcagctgtggtgttcctcacggtatatcgatgttccccaacgatgtgcatgaagatcagactcggtccgacgccgctcgcgagtggcttctgccaaactacaaacgcaagaacctaaaggttttgactggtcaaatggtcggacgggttttgttcgataccaccacctccactcctaaagccgttggagtcaacttcggcacacataacaaggtcaactttgacgtccacgctaaacatgaggtccttttggccgctggatcaaccgtgtctccccaaatccttgagcattctggcgttggcttgaagactgttctcgacaaggtcggcattaagcaggttgttgagctgcccgttggtctcaatctccaagatcaaactaccaccactgtccgctcggccatcaacccaattggtgcaggccagggccaggctgcgtattttgccaccttcaacgaaaccttcggggatcaggcacctcgtgctcaccagctcctaaacaccaagcttgaagagtgggcgaaggatgctgtctcccggggcggcttccacaacgaaaccgcactcctaatccaatatcaaaattaccgcgactggcttgtcaactccgacgtctcttacgctgagatcttcattgacactgctggaaaactgagccttgacctgtgggatctcattcctttcacccgtggctatgtccacatcctggacagtgacccatatcttcgtcgctttgcatacgaccctcaatacttcttgaatgagctcgacctccttggtcaggcagcagcctcgaagttggctcgtgagatttccaacaaaggtgaaatgacgaagtatttcaacagcgagaccgttcccggaaacaacctagcgtacaacgctactctcgaccaatgggtagactatgtcaagcagaatttccgtcccaactaccatggagtcggcacatgttccatgatgtcgaaggaacttggcggtgtcgtggacgctgctgctcgtgtctatgacgttgaaggtctgcgtgtgattgacggttcaattcccccaactcaagtttcgtctcatgttatgaccgtcttttacggtatggctgagaagatctcggaagctgtcctttccgactatcatgcttcgaactgatcctctctcgccacttgatgcctcttgtgcatcatggcgtacctactgagtacacatatacggcagaaccggtacggatctgattgtcatagtttctactttccttctgatctaccccagtggtgtatttttgttgggaaacctttcttgaaattgcaatagacttggtgatagacttggtgatagactgggagatagacggagtgatagacggggcttgtgattttcttatatattttctaccctgtgcatacataaatgtatatgttcatatttttattagacttggatattttgtttcaacaacaactattcaatgtcgaaatacaaacgttttagtgtttacctcattcaaagtctttaggccgatctcgcggacaagtaggtcaactgcctctggtgtctgtacgtgcgcgagttgggattccttttaatctagcactgtcacatgtttcacgtccggcacgccacgtaaatttgaaatttcgctgcgtagaaga

SEQ ID NO: 52 - DNA, 2824 bp, Aspergillus niveoglaucus
  source 1..2824: mol_type = genomic DNA
ccatacacagtctgcttgtctttttttttttttttgattctccacttcgttgtagagtatactttgcatgccatttcggtgtcttttcggtgagatttcgactctcaaggtttgtcggaaccaattattgtccacatgtgcactatattcagcccgctcagcttctcccaggattgtcagcattgaacttggcagagataggccatcttggttcggaattgttggtaaaatgggtgacacacaggtgcttattcgtactgtgattagctcgttgcttcttgccgtacgaggttcatatgaccatagactcgataggaagaaagacccgaaagtctatataaggtgatatccgcctcgtatgagtccttccctctcccaggcctggcttgttctttcatcattagcttcattgctcttctttcggcaactctgaattcgatctttccttcttttcttttctttcttctccttgttgttgctccgtcgagcagtacgccatcatgaggccactcatctggcctttgtttctctccgttgcgacggcactgcccaagttccctcgtgagcattttgacgttcaacctcaactgctcaccgacccaaccgtgcttgccaacaccactgtcgactacatcattgccggtggtggcttgaccggcctgaccattgccgcacgcctaactgaggaccctaaaatcaaggtcttggtcattgagagcggcttcttcgaatcaaaccgcggtcccatcatcgaagatctcaatagttatggtgaaatttttgggaccgaggttgaccatgcatttgagactgtctcacttgctgtcaacaaccgtaccgagaatattcgttccggtaacggcctgggaggttccacccttatcaacggtggtacctggacccgacctcacaaggtccaaattgacagctgggagagagtctttggcaacgaaggctggaactgggatgaccttctcccatacatgctcggtatcgagaaagcccgtcaccccaaccagaggcaaatcgaggctggccattacttcaacccacagtgccacggatcgaacggcaccgtccatgctggaccccgtgatactggcgaatcttactctcctatcatgaaggcgcttatggacactgttagcgcagatggtgtccctgtcaggaaggacttgggctgcggtgaccctcacggagtgtccatgtttcccaactcgttatacgagagccaaatccgtgccgatgctgcgcgggagtggttggtccccaactactatcggcccaacctccaagttttgactggccaatcggttggtaaagtgttgcttgacaagaccgttcccggtgctcccaaggcaattggtgttgagtttggaacgcacagaactcgaaaatatgaaacctttgctagccgggaagtcctgctggcggctggatcgactatttcccccacgattctcgagtactcgggcatcggtatcaagtcggttctggactcggttggcatcgaacaggtggtggacctgccggttggtcttaaccttcaagaccagactaccgtcaatttgcagtcaaggatcaccccagatggtgctggccagggccaggctgcgtactttgccacgttcaacgagacattcggcgactttgctccccaggcacacgaactgctcaacaccaaactcgaccagtgggccgaagaggtcgtggcccgaggcggcttccacaacgcgacggcattgaggatccagtatgaaaactaccgtgactggctggtaaacgacaacgtggcttactccgagctcttcctcgacacggccggcaagattagcttcgacgtgtgggacttgattcccttcactcgcggctatgttcacattgcggacaaggatccatacctccgccgcctgagcaacgaccctcagtacttcctgaacgagcttgatgtgctaggccaggccgctgcttccaagcttgcccgcgagctctccagcaggggagctatggcgcagtacttcgccagcgaaacagtgcccgggtatgataggttgcctgcggatgcgagcttgcaggactgggcgaagtacgtgaaggacaggttccgggccaactaccacgccgtgagtacatgttccatgatgcccaaggagatggggggtgttgtagactcgacggcacgtgtgtatggcgttgagagattgcgcgtggtcgatggctctattcctccgacgcaggtgtcgtcgcatgtgatgactgtgttttatggcatggcggtgaagattgcagaggcgattctgcaggatcaccatacgcggaagtaaagtgcataacagtgttgttgttgttgttgttgttggtggcggttactgtacacttagtcaattgcgatatccgtaattattttgggtattctcaattttttttttcttttgatagaagttaatagactcatagacttggtgaattgattctctttggggactggatgttctttactgtcagcatcggaagcatcatccgacgctctatccgcgataaatcagattttgagcaataatgcaggatccctgattgaccaatgtgttgatgtccagtaaaactgagagtaaagtgaaggtgagagagggagagtgagagatgggaaggggaaggagggagagaaaacgtggaggtggaccggaaactaacccgaaaaggagaatgaaccgattattccccgtaatgactgacatgattgcatactatgtacagtgttggctatgtacaggtacagtacgtcactcaatgtatatcaacatccacaagaatatacattagagtc

SEQ ID NO: 53 - DNA, 2818 bp, Talaromyces bacillisporus
  source 1..2818: mol_type = genomic DNA
gtcgatatttcccacgtgctttagacaatatcctctgcagagctatgatgcttccttcttggaaaagacatgatatacggagtaggggtaaaggctatgggagcatgaaggccagggctagatgccactcttcattgtgtttcttaccaatgataataaggatgctgatgatcatgatggacatggcgtttcgtcgccgatgaaggtataccatgacgtctgatactgactcccattagccagctgctgggccacccattgggtgactgtggacgctgtcccattcaactggcgtcgacacactgacctcaagtgctgtatcctatgatacacggtgcgaagacttctactagaagagatatgtagctttcgtgtgtcgaatctatatattaggctggtatctgccggtgattaacattaattcatgtatcgaagcacacaaccaactcattcattccttaaagcttttatactctctctttttgatagtatccttcaggatgaagtccatccttatcgtttctgccctcgcctccctggctggagcccagggctacactcctgccgagcagattgatgtccagtccagcctgatctccgacccaaaaaatgtctctggccggacgttcgactacattattgccggaggcggcctgactggtctcactgttgccgccaagttgtctgaggaccccaatatcagcgtgctcgttatcgagaagggcttctacgagtccaacgacggccccataatcgagaaccccaacgactatggcctgatcttcggtagctctgttgatcaaaattacctcactgtgcccatggccatcaacaaccgcaccctggatatcaagtctggcaagggtcttggtggttccacattgattaacggggactcctggactggtccggacaaggtccagattgattcgtgggagactgtcttgggcaaccccggctggaactaccacgccctcaaggaatacatgaacaaggccgaacgtgcccgttatccgactaccacccagattgccgccggtatgtactttaactctacctgccacggattcaatggcaccgtcaactccggaccccgtgacgacggcagaccttactctcccctgatgaaggccctcatgaacaccacctcggccatgggtgttcccactcaggccgacctcctctgcggccacccccgcggtgtctccatgatctacaacaacctgcttccggaccagacccgtgctgatgctgctcgtgagtggcttcttcctaactacaagcgccccaacttgagcatccttactggccagatcgtgggaaaggttctcttcgacaaaactcccactggtcccagggctgttggtgtcaacttcggcaccaacaaggccgtcaatttcaacgtctcggccaagcacgaggtcctactagccgccggctctaacgtctccccactgatcctcgagcactctggtattggtctgaagtctgtcctcgatcagttcaacatttcccagctcgtggaactgcccgtcggtctcaacatgcaggaccagaccaccaccactgtccgcgcgcgggccaaggcttctgctgctggccagggccaggccgtatactttgccaacttcaccgaggtctttgggaaccacaccgctcaggctaccaatttgctcaacaccaagctcgaacagtgggccaacgagactgttgcgcgcggaggattcaacaacgctactgctctcttaatccaatacgagaactaccgtaaatggctcctggacgaagatgttgcctatgtcgagcttttcttcgacaccaacggcaagatgaactttgacctgtgggatctcatccccttcactcgcggatccgtgcacatagcccacgccgacccctacctccagtccttttccaacaaccccatgttcttgctgaacgagcttgaccttctgggtcaggctgctggctccatgcttgcccgtgagctgcagaactctggagagctctcaacctactttgatggcgaggacatccccggcgccgagctcttgccctatgacgctacgctcgatggctgggttggctacgtcaaggacaacttccgtgccaactggcatgctgtcagtacctgctccatgatgcccaaggagctcggtggtgttgttgactctgccgccagagtctacggcactcagggcctccgtgtcatcgacggctctattccaccgacccaggtgtcgtcccacgtcatgaccgttttctacgccatggccttgaagattgccgatgccatcttggctgactatactgcgtaatttatatctttttacgtcgagacttctgtggtccgagtttttgattaagttctacttgatgtttagttatatgtcttaagacaatcttgaggtgtggtttaggggactttatttgttctttcaatgttgcttttgacgttgttgcttcagtgcaggacactttctcttcagttatttggaaaggagtacatgcaatacatgtcgactggtactagtaatagtccagcgcattatctatacccgattcttacatgcccttgtgtacgctcatataggtatttcttcttttattttaacttagaaaagcaccacactcatgtcatacatctaatcacaagcaagtcaaattttgagtttgtgtagatcaattttttttgcctgatgtaactggcatttttcatcttgaagtctttgaccagcgtaacaatagttgctgtgaaaacacattagttcaacgtattgctacgcaagttacaaaccccttcttcatctcatgaaac

SEQ ID NO: 54 - DNA, 1431 bp, Microdochium nivale
  source 1..1431: mol_type = unassigned DNA
ttagttactcgtggtgctattgaagcttgtttatctgctgctggtgttcctattgatattcctggtactgctgattatgaacgtgatgttgaaccttttaatattcgtttaccttatattcctactgctattgctcaaactcaaactactgctcatattcaatctgctgttcaatgtgctaaaaaattaaatttaaaagtttctgctaaatctggtggtcattcttatgcttcttttggttttggtggtgaaaatggtcatttaatggttcaattagatcgtatgattgatgttatttcttataatgataaaactggtattgctcatgttgaacctggtgctcgtttaggtcatttagctactgttttaaatgataaatatggtcgtgctatttctcatggtacttgtcctggtgttggtatttctggtcattttgctcatggtggttttggtttttcttctcatatgcatggtttagctgttgattctgttgttggtgttactgttgttttagctgatggtcgtattgttgaagcttctgctactgaaaatgctgatttattttggggtattaaaggtgctggttctaattttggtattgttgctgtttggaaattagctacttttcctgctcctaaagttttaactcgttttggtgttactttaaattggaaaaataaaacttctgctttaaaaggtattgaagctgttgaagattatgctcgttgggttgctcctcgtgaagttaattttcgtattggtgattatggtgctggtaatcctggtattgaaggtttatattatggtactcctgaacaatggcgtgctgcttttcaacctttattagatactttacctgctggttatgttgttaatcctactacttctttaaattggattgaatctgttttatcttattctaattttgatcatgttgattttattactcctcaacctgttgaaaatttttatgctaaatctttaactttaaaatctattaaaggtgatgctgttaaaaattttgttgattattattttgatgtttctaataaagttaaagatcgtttttggttttatcaattagatgttcatggtggtaaaaattctcaagttactaaagttactaatgctgaaactgcttatcctcatcgtgataaattatggttaattcaattttatgatcgttatgataataatcaaacttatcctgaaacttcttttaaatttttagatggttgggttaattctgttactaaagctttacctaaatctgattggggtatgtatattaattatgctgatcctcgtatggatcgtgattatgctactaaagtttattatggtgaaaatttagctcgtttacaaaaattaaaagctaaatttgatcctactgatcgtttttattatcctcaagctgttcgtcctgttaaa

SEQ ID NO: 55 - DNA, 1639 bp, Chaetomium globosum
  source 1..1639: mol_type = genomic DNA
atgcagaccctcgcacccctcctggcccttctgggcctggcggcgacctcccacgccacctccttcgcccgcttcaccaacgagacaggcaccctcaccgactgcctcaccaaggccggcgtgcccatcggcgagtccgggacgcccgaatacaagatcgacgtcgcgagcttcaacctccggctcaactacacgccggcggccgtcgttgccgcctcgacggcccagcacgtgcaggatgccgtcgtgtgcgccaacaagttcggcatcaagccgacggccaagtgcggcgggcacagctacgcttcctttggtctgggcggtgaggacggccatctggtcatcgagatgagccgcatgaacaaggttgttctggacaacgtcacgggcatcgccacggccgagggcggtacccgtctgggccatctcgccatggaactctacacccaggggaagcgggccatcagccacgggacatgcccggggtaagtaacccaaccaactaccaaaccaaccccccgtaagagaaaccattgactaacactaccccagcgtcggcgtcggcggccacctcctccacggcgggtacgggatgagctcgcacacgcacggcctagccctcgactacgtgatcggcgccacggtggtgctggccaacggcacggtggtggagtgctcggagacgcagcacggcgagctgttctgggcgctgcgcggggcgggggcgtccatggggatcgtgaccgagttccggctcaagacgttcgaggcccccggccagctgacctacttcgtggcgcccgtgcagtggccgaccgaggcgagggcgctggtgggggttaccgccgtgcaggagtttgcgaagaccatgccggcggagctgaatatgcgcttgtttattgcgaggcggtttgttaatttggaggggctgttttatggggataaggaggacctgaaggctgcgctggcgccgttggtggccaagacgaatgctacgctggcgttggcaacgacgggggactggatggagcagattaagcattttggtgggggttcgaatattgatcaggggcatggttatgaggaggtgagtttcgggttgatggatacccctgacggaggctttactgacagacttgcccagcacgaaaccttttactcgaccagcttgtacaccaaggagctcaacgacgagcagctgcagaattttgttgggtactggttcaaccaggccaagaacaacacgagggactggtacgtgcagatcgacctgcacggcggtgagaactcggctgtgtcggcgcccgcggcggactcgaccgcgtatgcccaccgcgactacctcctgatgtacctcctgtacgaccgtgtcgacaagggcgagtacccggccgagggccacaccgtcatggagaactttgccggcaacatcacccaggggatggagcggagtgactggggcatgtacatcaactacccgaactcgaggctcgaccagaaggacgcgcagctcaactactggggtgacaacctgcccaagttgcaggccatcaagaaggacgttgatcccgaggacgtgttccacttcccgcagggtgtcatgcctgccgtgcgacatcagcaccagcatcagcactga

SEQ ID NO: 56 - DNA, 1644 bp, Neurospora crassa
  source 1..1644: mol_type = genomic DNA
atgtggcttccactcatcctcctcactgccacggcggcccccatcctcgccaaccccctaagctctccactcaacaagcgtgccgccatcgacgactgcctcaaatctgccggcgttccagccgatgctcaaggctcctccgagtggcgtaccgacgtcaaccctttcaaccagcgcctgccctacacgccagtagccatcgcggtccctaccaccattgaacacatccaaggtgccgtctcctgtgccaccaagctgggaattaaagttacccccaagtcaggagggcacagttatgcttcgtttggtctgggcggagagaacgggcatctggtcgtggagttggatcgcatgtcgaaggtgacgctggataagacgacgaatatcgcagatgttcaatcgggagcgagactggggcatgtggcgacggagctgtataaacagggcaaaagagctttctcgcatgggacttgtcctgggtacgttttcgtcaagcccttacttcttggcttggccggggctaaccaaggagggaaacagagtcggggtaggaggccactccctccacggcggctttggcttttcctcgcacacctacggtcttgcagtagactggattgccgccgccacagtcgtccttgccaacagcactgtagtgaccgcatcgccaaccgagaacccggacctcttctgggctttgcgtggcgctgggtccaactttggcattgtggcttccttcaagttcaacaccttcgctgcgccctcgcaagtaacggctttccagattaacttgccctggaactcagcgtcgtcgattgcatccggctgggaaaaactccaggactggttggcggctggcaatatgccgaaggagatgaacatgagggtcttcggctcgccgagtcagacgcaactgcagggcttgtatcacgggagtagctcggcgctgcggacggctgtgcagcccctgttgagcactctaggagcgagcttgagcaatgcgcagcagtacgactggatgggagcgtttacttattatacctatggcggcacggtggacgttacgcatccttacaacaccgtaggttccctctcgtttctttctttcttctccagcaactaattttttgccaggtcgaaaccttctactccaaatccctcgttaccaccgccctcccttccgcggctctgaactccgtcgccaactactggatcaacaccgccaagcgcgtctcgcgcgactggttcatcatcatcgacatgcacggcggtcccaagtccgccatcacctcctccaccaccaattccgccaactacacgagctcttacgcctatcgcgccccggaatacctcttcctttatgagctctatgatcgtgtgatgtttggaagctatccgagcaacggtttcagcttcctcgatggttgggtgaagagcttcacggataacatgaaacaggagcagtggggaatgtacattaactacgcagatcccacgatgaagagggccgaggctgtggggaactattaccgtagtagccttagcaggctgcagaaggtgaaggcgcagtacgatccgaacgaggttttctactacccgcaaagtgttgagccggcccgacatcagcaccagcatcagcactga

SEQ ID NO: 57 - DNA, 3183 bp, Thermothelomyces thermophilus
  source 1..3183: mol_type = genomic DNA
gctagcttctttggtcaccgtcgttttcgcccgccccctccctccttcaaccccctgagtagtcggctaagcgatcctcaatctggtcttgtgaggtcacgtcctccagcagatgacagttcatcgagcgagtgatctccaccacccagaagggaggggggatgcgcgcatgctccaacatccctggtgtcgctagagacgtcgcggcatcagccttttcatcacaccgagcacgtccacggaccggctcctttcacccccgcgtcctccggaggattgagtcacgatatttcgggatgtgggaagggggagagaaaggaggggggaggggcggaaacatgttggatacgagctgcgcccctttttcaacatcgagaacaggaagtcgttggtgtcggccgtaatgtctataaaacgaggctccttctcgtcgtcgacttgtctcaggttctctctctcgtccacaccaagccagtcttgcctgagccacctgagccaccttcaactcatcatcttcagtcaagtcgttcattgacattgtgtctctctttctatcgagtcggcttcccggcccttcaccacaacatgaagtccttcatcagcgccgcgacgcttttggtgggcattctcacccctagcgttgctgctgcccctccatccacccctgagcagcgcgacctgctcgtcccgatcacggagagggaggaggcagccgtgaaggctcgccagcagagctgcaacacccccagcaaccgggcgtgctggactgacggatacgacatcaacaccgactacgaagtggacagcccggacacgggtgttgttcggccggtgagtgctctcgttaattacgcttcggcgagttgcgcagatatattaaatactgcaaacctaagcaggagctgacatgcgacagtacactctgactctcaccgaagtcgacaactggaccggacctgatggcgtcgtcaaggagaaggtcatgctggttaacgtacggcaccccttttcttgtcctaggatctgggtgatgtgcgtcgttgcccctgagagagactgaccgagcctttggctgcagaatagtataatcgtaattaattataccgccctgcctccagcagccccagcagctcgagaagggtatctgaagttagtcaggcctgctgacctgaccggggccaacccaccatagggaccaacaatctttgcggactggggcgacacgatccaggtaacggtcatcaacaacctcgagaccaacggcgtatgtctgctgcttgctctcttgctctcctcgtccgcgactaataataatatcaactcgtgtggaaaacagacgtcgatccactggcacggactgcaccagaagggcaccaacctgcacgacggcgccaacggtatcaccgagtgcccgatcccgcccaagggagggaggaaggtgtaccggttcaaggctcagcagtacgggacgagctggtaccactcgcacttctcggcccagtacggcaacggcgtggtcggggccattcagatcaacgggccggcctcgctgccgtacgacaccgacctgggcgtgttccccatcagcgactactactacagctcggccgacgagctggtggaactcaccaagaactcgggcgcgcccttcagcgacaacgtcctgttcaacggcacggccaagcacccggagacgggcgagggcgagtacgccaacgtgacgctcaccccgggccggcggcaccgcctgcgcctgatcaacacgtcggtcgagaaccacttccaggtctcgctcgtcaaccacaccatgaccatcatcgccgccgacatggtgcccgtcaacgccatgacggtcgacagcctcttcctcggcgtcggccagcgctacgatgtcgtcatcgaagccagccgaacgcccgggaactactggtttaacgtcacatttggcggcggcctgctctgcggcggctccaggaatccctacccggccgccatcttccactacgccggcgcccccggcggcccgcccacggacgagggcaaggccccggtcgaccacaactgcctggacctccccaacctcaagcccgtcgtggcccgcgacgtgcccctgagcggcttcgccaagcggcccgacaacacgctcgacgtcaccctcgacaccacgggcacgcccctgttcgtctggaaggtcaacggcagcgccatcaacatcgactggggcaggcccgtcgtcgactacgtcctcacgcagaacaccagcttcccacccgggtacaacattgtcgaggtgaacggagctgatcaggtaagaaaaaggggaccgcaggggtgctgctgcaagtacaccttgctcgccctcctgttcttccttaataactacctcccaaccctcccccctaattaattcactttaaaggccgatcaagactgaccgagccccctctctttgcagtggtcgtactggttgatcgagaacgatcccggcgcacctttcaccctaccgcatccgatgcacctgcacgtaagttggatacatatatatatatatatatacattgctttcctggctcgctcccttaaataaaattaaataaccaaaaataacaaaaaaaagggccacgacttttacgtgctgggccgctcgcccgacgagtcgccggcatccaacgagcggcacgtgttcgatccggcgcgggacgcgggcctgctgagcggggccaaccctgtgcggcgggacgtgacgatgctgccggcgttcgggtgggtggtgctggccttccgggccgacaacccgggcgcctggctgttccactgccacatcgcctggcacgtctcgggcggcctgggcgtcgtctacctcgagcgcgccgacgacctgcgcggggccgtctcggacgccgacgccgacgacctcgaccgcctctgcgccgactggcgccgctactggcctaccaacccctaccccaagtccgactcgggcctcaagcaccgctgggtcgaggagggcgagtggctggtcaaggcgtgagcgaaggaggaaaaaggaaacaaagaggggggggggggctagttcctatttttgctttttttttttgttcttgtccttgtgctggcggttaccctggtaaaggagaagggggccccaagttcgagtgggtgtgtgatcgggtaaatattatc

SEQ ID NO: 58 - DNA, 2142 bp, unidentified
  source 1..2142: mol_type = unassigned DNA
caatgtccttatttatctggtgaaatgtcttttactcaagaacaagataatgctggtgatactattgaagttactgaacaaactattgataatactttatatgttaatgatactggttcttatatgactactgattttggtactcctatttctgatcaatattctttaaaagctggtcgtcgtggtcctactttattagaagattttatttttcgtcaaaaattacaacgttttgatcatgaacgtgttcctgaacgtgttgttcatgctcgtggtgctggtgcttatggtacttttaaatcttatgctgattggtctaatgttactgctgctgattttttatctgctaatgaaaaagaaactcctatgttttgtcgtttttctactgttgttggttttcgtggttctgttgatactgctcgtgatgttcatggtcatgcttgtcgtttttatactgatgaaggtaattatgatattgttggtattaattttgctcctttttttattcaagatgctattcaatttcctgatttagttcatgctattaaacctatgcctaataatgaaattcctcaagctgctactgctcatacttctgcttgggattttttttctcaacaatctactgctttacattctgctttatggttaatgtctggtaatggtattcctcgttcttttcgtcatatgaatggttatggtgttcattcttttcgttttgttgctgctaatggtacttctaaagttgttcgttatcgttggaaatctcaacaaggtgttgcttctttagtttgggaagaagctcaagctgctgctggtaaaaattctgattatcatcgtcaagatttatataatgctattgctaatggtcattatcctaaatatgaattacaagctcaaattatggatgaagctgatatgttacgttttggttttgatttattagatcctactaaattagttcctgaagaagttgttccttatactcctttaggtatgatggaattaaatgctaatcctactaattattttgctgaagttgaacaagctggttttcaacctggtcatgttgttcctggtattgattttactgatgatcctttattacaaggtcgtttattttcttatttagatactcaattaactcgtcatggtggtcctaattttgaacaaattcctgttaatcgtcctcgtaaacctgttcataataataatcgtgatggttttggtcaacaacaaattcctactaataattgggcttatactcctaatactatgtctaatggttatcctatgcaagctaatcaaactcatggtcatggtttttttacttctccttatcgttatgcttctggtcatttaattcgtgaaccttctcctacttttcatgatcattggtctcaacctgctatgttttggaattctttaattcctgctgaacaacaaatggttgttaatgctattgtttttgaaaattctaaagttaattctcctcatgttcgtaaaaatgttgttaatcaattaaatatggttaataataatttagctgttcgtgttgctcgtggtttaggtttagatgaaccttctcctaatcctacttattatacttctaataaaacttctaatgttggtacttttggtaaacctttattatctattgaaggtttacaagttggttttttagcttctaattctcatcctgaatctattaaacaaggtcaagctatggctgctcaattttctgctgctggtgttgatttaaatattgttactgaagcttatgctgatggtgttaatactacttatgctttatctgatgctattgattttgatgctttaattattgctgatggtgttcaatctttatttgcttctccttctttagctaatcaaatgaattctactgctacttctactttatatcctcctgctcgtccttatcaaattttagttgattcttttcgttatggtaaacctgttgctgctgttggttctggttctgctgctttaaaaaatgctggtattgatacttctcgttctggtgtttatactggttcttctgaaactactgaaaatattgctaaagaagttttaaaaggtttatatacttttcgttttgttgatcgttttgctttagatgaa

SEQ ID NO: 59 - DNA, 15420 bp, Thermoascus aurantiacus
  source 1..15420: mol_type = genomic DNA
ttgaagttcctattccgagttcctattctctagaaagtataggaacttcgctagcccgttaaattgccgtcgtcagccgttaaattaccgattaatcccgataaatttccgagatctccgttaaattgccgttcgcagccgttaaattaccggggacgaccgataaatttccgcgatgaattcatggtgttttgatcattttaaatttttatatggcgggtggtgggcaactcgcttgcgcgggcaactcgcttaccgattacgttagggctgatatttacgtaaaaatcgtcaagggatgcaagaccaaaccgttaaatttccggagtcaacagcatccaagcccaagtccttcacggagaaaccccagcgtccacatcacgagcgaaggaccacctctaggcatcggacgcaccatccaattagaagcagcaaagcgaaacagcccaagaaaaaggtcggcccgtcggccttttctgcaacgctgatcacgggcagcgatccaaccaacaccctccagagtgactaggggcggaaatttatcgggattaatttccactcaaccacaaatcacagtcgtccccggtaatttaacggctgcagacggcaatttaacggcttctgcgaatcgcttggattccccgcccctggccgtagagcttaaagtatgtcccttgtcgatgcgatgtatcacaacatataaatactggcaagggatgccatgcttggagcaacaatctcagaacaccaatatcaattcatctcgagtctgaactcagacaacacaaattcttcaaaattgaggatttagtcttgatcggatccaccatgcgtcatttctggcttttgccagctgttgctggtatcgctggggctgcatgtccctacatgacaggcgagctccctcggtcgttcgccgaaaaccctcacgccattaacaggcgagcggagggaggaggaggcgcagcagccgaaacagaaaagttcttgtcccagttctatttgaacgataacgacacgttcatgactacggatgtcggtggaccgattgaggaccagaactccctctcggcaggagatcgaggacccaccctcttggaagatttcatcctccgtcagaaaattcagcggttcgaccacgaaagggtgccggaacgcgcagtccatgcccgaggcgcaggtgcccatggcgtgttcacttcctacgcagactggtcgaacatcactgcagcgtcgttcctctccgcagcaggcaaggagacacccgtgttcgtcaggttctcgactgtggcaggctccaggggatcggcagacactgcacgcgatgtccatggtttcgccacaaggttctataccgatgagggtaacttcgatatcgtgggcaacaacattcccgtcttcttcatccaggacgccatccagttccccgacttgatccatgcggtgaagccgtcgcccaacaacgaaattcctcaggcagccacagcacacgattcggcatgggacttcttctcgcagcagccgtcgtcgttgcataccctcttctgggccatggcaggacacggaattcctcggtcctatcgaaacatggacggattcggcatccacaccttcaggttcgtcacagacgatggagcgtcgaagttggtgaagttccactggacctccctccagggcaaggcgtcgttggtctgggaagaagcacaggccgtcgcaggcaaaaacgccgattaccacaggcaggatttgtgggatgcgatcgaagcaggacgctatcctgaatgggaattgggtgtgcagatcatggacgaagaagaccagttgcggttcggattcgatttgttggaccctaccaagatcgtccccgaagaatacgtccccatcaccaaattgggcaagatgcagttgaaccgtaacccgttgaactatttcgcggaaactgaacagattatgttccagcctggccacgtggtgaggggcatcgatttcaccgaggaccctttgctccagggccggttgttctcgtacctcgacacccagctcaaccggcatggcggacccaacttcgagcagattcccatcaaccgacctcgcactccgatccataacaacaacagggatggtgcagcacagatgtacatccccttgaacaaggcagcgtacactcccaacacgctcaacaacggttcgcccaagcaggcgaaccagactgtgggcaagggcttcttcaccactcctggacgcactgcctccggcaggctcgtccgagcggtctcgtcgactttcgcggacgtctggtcgcagcccaggctcttctacaactcgctcgtgcctgccgaacagcagttcctcattaacgcaatccgattcgagacggcccacattacgtcggatgtggtcaagaacaacgtgatcatccagctcaaccgagtctccaacaacttggcgaaacgggtggcaagggcgatcggcgtggccgagcccgaacccgaccccaccttgtaccacaacaacaagacagcaaacgtgggcgtgttcggaaagccgttggccaggctcgacggattgcaggtcggcgtcctcgcaaccgtcaacaagccggactccatcaagcaggcagcctccctcaaggcctcgttcgcagcagataacgtcgacgtcaaagtcgtcgcggagaggctcgcagatggcgtggacgaaacctactccgcagccgatgccgtcaacttcgacgcgatcctcgtggcaaacggagccgagggattgttcgcacgggactcgttcacagcacgccctgcaaactcgaccactgccacactctaccctgcaggccgaccgctccagattttggtggacggattcaggtacggcaagcctgtgggtgcactcggatcgggagcaaaggccctcgatgcagccgaaatctcgactacaagggcaggcgtctatgtcgcgaactcgacaaccgattccttcatcaacggtgtcagggacggcctccgtactttcaaattcctcgatcgcttcgccatcgacgaagacgccgagtgacacgtgacaatcaatccatttcgctatagttaaaggatggggatgagggcaattggttatatgatcatgtatgtagtgggtgtgcataatagtagtgaaatggaagccaagtcatgtgattgtaatcgaccgacggaattgaggatatccggaaatacagacaccgtgaaagccatggtctttccttcgtgtagaagaccagacagacagtccctgatttacccttgcacaaagcactagaaaattagcattccatccttctctgcttgctctgctgatatcactgtcattcaatgcatagccatgagctcatcttagatccaagcacgtaattccatagccgaggtccacagtggagcagcaacattccccatcattgctttccccaggggcctcccaacgactaaatcaagagtatatctctaccgtccaatagatcgtcttcgcttcaaaatctttgacaattccaagagggtccccatccatcaaacccagttcaataatagccgagatgcatggtggagtcaattaggcagtattgctggaatgtcggggccagttggcccggtggtcattggccgcctgtgatgccatctgccactaaatccgatcattgatccaccgcccacgaggcgcgtctttgctttttgcgcggcgtccaggttcaactctctcccctagcctagcggggttcaaatgcaaacaagtacaacacgcagcaaacgaagcagcccaccactgcgttgatgcccagtttgactgtccgaaatccaccggaaaggtggaaacatactatgtaacaatcagagggaagaaaaaatttttatcgacgaggcaggacagtgactgatggtggggtcatggtcgggtctccgagcgaaagagaaccaaggaaacaagatcaacgaggttggtgtacccaaaaggccgcagcaacaagagtcatcgcccaaaagtcaacagtctggaagagactccgccgtgcagattctgcgtcggtcccgcacatgcgtggtgggggcattacccctccatgtccaatgataagggcggcggtcgagggcttaagcccgcccactaattcgccttctcgcttgcccctccatataaggattccccctccttcccctcccacaacttttttccttctttctctcttcgtccgcatcagtacgtatatctttcccccatacctcctttcctactcttcttccattcattcaactcttctccttattgacatctgttttgctcagtacctctacgcgatcagccgtagtatctgagcaagcttctctacagaatctttctagtatcttacaaagaactacaaagttcgcaccaggatccaccatggagtcgcttctccagcagtcccgggccatgtccccgttcctcaagcgcacttccccgaccactttgcgctcactgtcgaccgcgacccgtcccagcaccagccctggcggaggcaccatgtccaacctccaggtcctggctcgtcgctccccagtgatgagcaaggctctggcggtgcagagtgctcgtctggctcacaccaagcggttcacctcttatactgccggtgtggcgggcctgaaccccaagcaattccggcccactgtcggcaagagagcgttgcattccaccgccggcaatggcgctgatgtgaccccgaatgtctacaaggagtcacagcgaggttagtgcttttccttattttctctcgcacagtcacaacgccaatgtaattgtactgacggaattccccccagttcaccccggtcttaccggtgttcccaagcagcagctcgaaccttctgccgctaccgtgcccggccctcgtccccatgcccccaacgccgcacccttcaactacaatgcattctaccagggcgagctcgagaagaaacacaaggacaaatcgtaccggtacttcaacaacatcaatcgcctggccaaggagtttcctcgtgcccacaccgcttctcctgaagagagggtgaccgtgtggtgctccaacgactacctcggcatgggtcgtaaccccgaggtgctgaaatctatgcacaagaccttggacaactacggagcgggtgccggaggtactcgcaacatttccggacacaaccagcacgccgttgctctcgagagcaccttggccaaacttcacaacaaggaggctgcgctagtcttcagttcctgcttcgtggccaacgatgcgactctggcgactctgggcagtaagatgccagactgtgtcattctgtctgacagtctcaaccacgcctccatgatccagggtatccgtcactctggagccaagaagatggttttcaagcacaatgacctggtcgatctggaaaccaaacttgcatctctccctctgaacgtccccaagattattgctttcgaatccgtctacagtatgtgcggatccattgcccccatcgaaaagatctgtgatctggccgacaagtacggtgccatcaccttcctcgatgaagtccatgccgtgggtatgtacggacctcacggtgcgggagtggctgagcacctcgactacgacatttacgcttctcaagatacggccaaccctcgtgacaccaagggaaccgtcatggaccgtatcgacattatcaccggtactctcggcaaggcgtatggttgcgttggtggctacattgccggatcggcggcaatggtggacaccatccgctctctcgcccccggtttcatcttcacaacttcgctgcccccagctaccatggctggagcggacaccgccatccagtaccaggcacagcaccagcgcgaccgcgtcctgcaacagttgcacactcgcgcggttaaggaatcactcaaggagctggatattccggtgattccaaacccgtctcacatcatccctcttctcgttggtgatgccgaggtggccaagcaggcctcggacaagctgctcgaggagcacggcatctatgtgcaggccatcaactaccccaccgtgcctcgcggtgaggagcgtctccgcatcacccccacccccggccacgtcaaggagcaccgggaccatttggtgcaggctctgcagaccgtctggaacgatctgggcatcaagcgcgccagtgactgggaggcccagggaggctttgttggcgtgggtgtcgagggtgccgaggccgccaaccagcccatctgggaggacgcgcagctgggcctgcagcctaacgaaaccgtcgaagctgccgtgacgcgggagttccagacggctgctgccgaagcgctctctcaggccgcttcccgcatgcagaccgccactccggtgcgtcccgccgctgctgctgctgcctcaatccccgtgggagtggctgctgcttaacacgtgacaatcaatccatttcgctatagttaaaggatggggatgagggcaattggttatatgatcatgtatgtagtgggtgtgcataatagtagtgaaatggaagccaagtcatgtgattgtaatcgaccgacggaattgaggatatccggaaatacagacaccgtgaaagccatggtctttccttcgtgtagaagaccagacagacagtccctgatttacccttgcacaaagcactagaaaattagcattccatccttctctgcttgctctgctgatatcactgtcattcaatgcatagccatgagctcatcttagatccaagcacgtaattccatagccgaggtccacagtggagcagcaacattccccatcattgctttccccaggggcctcccaacgactaaatcaagagtatatctctaccgtccaatagatcgtcttcgcttcaaaatctttgacaattccaagagggtccccatccatcaaacccagttcaataatagccgagatgcatggtggagtcaattaggcagtattgctggaatgtcggggccagttggcccggtggtcattggccgcctgtgatgccatctgccactaaatccgatcattgatccaccgcccacgaggcgcgtctttgctttttgcgcggcgtccaggttcaactctctcccctaggggaccagccaggcgccactcggccgggccacagctgcttgggtgttgaccgggagcggaccaattaaggactcgaacgaccgcggggttcaaatgcaaacaagtacaacacgcagcaaacgaagcagcccaccactgcgttgatgcccagtttgactgtccgaaatccaccggaaaggtggaaacatactatgtaacaatcagagggaagaaaaaatttttatcgacgaggcaggacagtgactgatggtggggtcatggtcgggtctccgagcgaaagagaaccaaggaaacaagatcaacgaggttggtgtacccaaaaggccgcagcaacaagagtcatcgcccaaaagtcaacagtctggaagagactccgccgtgcagattctgcgtcggtcccgcacatgcgtggtgggggcattacccctccatgtccaatgataagggcggcggtcgagggcttaagcccgcccactaattcgccttctcgcttgcccctccatataaggattccccctccttcccctcccacaacttttttccttctttctctcttcgtccgcatcagtacgtatatctttcccccatacctcctttcctactcttcttccattcattcaactcttctccttattgacatctgttttgctcagtacctctacgcgatcagccgtagtatctgagcaagcttctctacagaatctttctagtatcttacaaagaactacaaagttcgcaccaacgcgtaccatgcctcaatcctgggaagaactggccgctgataagcgcgcccgcctcgcaaaaaccatccctgatgaatggaaagtccagacgctgcctgcggaagacagcgttattgatttcccaaagaaatcgggtatcctttcagaggccgaactgaagatcacagaggcctccgctgcagatcttgtgtccaagctggcggccggagagttgacctcggtggaagttacgctagcattctgtaaacgggcagcaatcgcccagcagttagtagggtcccctctacctctcagggagatgtaacaacgccaccttatgggactatcaagctgacgctggcttctgtgcagacaaactgcgcccacgagttcttccctgacgccgctctcgcgcaggcaagggaactcgatgaatactacgcaaagcacaagagacccgttggtccactccatggcctccccatctctctcaaagaccagcttcgagtcaaggtacaccgttgcccctaagtcgttagatgtccctttttgtcagctaacatatgccaccagggctacgaaacatcaatgggctacatctcatggctaaacaagtacgacgaaggggactcggttctgacaaccatgctccgcaaagccggtgccgtcttctacgtcaagacctctgtcccgcagaccctgatggtctgcgagacagtcaacaacatcatcgggcgcaccgtcaacccacgcaacaagaactggtcgtgcggcggcagttctggtggtgagggtgcgatcgttgggattcgtggtggcgtcatcggtgtaggaacggatatcggtggctcgattcgagtgccggccgcgttcaacttcctgtacggtctaaggccgagtcatgggcggctgccgtatgcaaagatggcgaacagcatggagggtcaggagacggtgcacagcgttgtcgggccgattacgcactctgttgagggtgagtccttcgcctcttccttcttttcctgctctataccaggcctccactgtcctcctttcttgctttttatactatatacgagaccggcagtcactgatgaagtatgttagacctccgcctcttcaccaaatccgtcctcggtcaggagccatggaaatacgactccaaggtcatccccatgccctggcgccagtccgagtcggacattattgcctccaagatcaagaacggcgggctcaatatcggctactacaacttcgacggcaatgtccttccacaccctcctatcctgcgcggcgtggaaaccaccgtcgccgcactcgccaaagccggtcacaccgtgaccccgtggacgccatacaagcacgatttcggccacgatctcatctcccatatctacgcggctgacggcagcgccgacgtaatgcgcgatatcagtgcatccggcgagccggcgattccaaatatcaaagacctactgaacccgaacatcaaagctgttaacatgaacgagctctgggacacgcatctccagaagtggaattaccagatggagtaccttgagaaatggcgggaggctgaagaaaaggccgggaaggaactggacgccatcatcgcgccgattacgcctaccgctgcggtacggcatgaccagttccggtactatgggtatgcctctgtgatcaacctgctggatttcacgagcgtggttgttccggttacctttgcggataagaacatcgataagaagaatgagagtttcaaggcggttagtgagcttgatgccctcgtgcaggaagagtatgatccggaggcgtaccatggggcaccggttgcagtgcaggttatcggacggagactcagtgaagagaggacgttggcgattgcagaggaagtggggaagttgctgggaaatgtggtgactccatagctaataagtgtcagatagcaatttgcacaagaaatcaataccagcaactgtaaataagcgctgaagtgaccatgccatgctacgaaagagcagaaaaaaacctgccgtagaaccgaagagatatgacacgcttccatctctcaaaggaagaatcccttcagggttgcgtttccagtctagatcgcgattgaagttcctattccgagttcctattcttcaaatagtataggaacttcacctagcaaagtattttcggtacgattttgacatttgctccattgtcgaggatggatggaacgagcggcgtgcgccacgaaagtgaggctattgcctatcagctctttgctacattccggaaacaaacatccctttttgtgaattatctacgcaacttagatggcgtgaacgcatcttcaaagtctttcggcaggtccggcacgacttttgcatccagagaagcgcctacatgtgtattcgaccacctcctagcgcgcttggatatgaggaaatattactgagagtcgaaaacaagctccaccgcaccagctcttcttggagttttatattaaagaatattcccagctcgttgtattattctttttctaccgtgctaatgtatcaaggactttggtacctattaacgttattattcgtgtgctattcccaaacataaccctgtatatgtttcgaacgccgttatgacccatgtcttacatactcattaagtcattcccttggataatctcgactcagatgcggcggttgatgtaggaggagaggtaatcgaggacctcctgggagatgatgccgttccaggcggggtagcggatggagccctcggcggagcccttgagctgctcgatatgctgccactcctcgatggggttggtctcatccttgagggcgatcatctccttggagatgggatcgtaggcgtagtagcgggagactagtgcgaagtaatgatcggggatggcggtgatctgatgggtgtaggtggtgcgggcgacggcggaggcgcgcttatcggaccagttgccgacgacgttggtgagctcggtgaggcccttcatggagaggaaggaggtcatgagatggcggccgatatgggacttggggccgttcttgatggcgaagatggagtagggggcgttcttcttgagggccttgttgtaggagcggacgaggttatccttgaggagctggtactcctgcttgttggaggaggagttgccggtgcggttgacgcgcttgaggacgggctcggagttgcggaggaactcatcgaggtagacgaggggatcgatgcggccgcgggcggagaagaagtagatatggcgggagacggaggtcttggtctcggtgacgaggcactggatgatgacgccgaggtacttgttctggacgagcttgaaggacttgggatcgacgttcttgatatcggagaagcggccgcagttgatgaaggtggcgaggaagaggaactggtagagggtcttggtcttggtgaagcgggaggtgtactcgaaggagttgaggatcttctcggtgatctcccagatggactcgccctcggagaggagggccttgagcatcttcttggaatgggagttgcccttatcggcctcctcggaggactcgaactggagctggagggaggagacgatatcggtgatatcggactgatgcttctggccgtagtaggggatgatggtgaactcccaggcggggatgagcttcttgagggaggcctccaggatggtggccttctgggtcttgtacttgaactggagggacttgttgacgatatcgaaggagagggagttggagatgatggtgttgtaggacatgaaggtggcgcgcttgatggcggtgccgttatgggtgatcatccagcagaggtaggtgagctcggcggcgcagagggcgatcttctcgccggaggggcgctcgaagcgctcgacgaactggcggacgaggaccttggggggggtcttgcagaggatatcgaactggggcatggtggatcgatccttatgttttgacaaagcgacagaacagcgtcccaagcacagcttgactatccagagaacgctgtccctgacgacgattcttaaatatttgcgttcagcatgactccagagccttgagcaccttgcacggcagatcaacccacgaactacccttctaatcccgtatgatgcttgatggatgccaaatggagccggcaattaatccatctgccaggaacgggggtatacaacatctctcattggccgaaactccgatcagttcgggggccaggatttaaccctggtcccctttaattgttgcagaacaacaaatctccgacacgggactactgactgttaactgaatacgcctgatagtgggggtaagaaacaacgcccgaaccttgttatgactcgtggaggacgcgacggattgctcggggggtggtgagccggggttaacagggtaagctgcaggctgcccgttagggcgcctcgcttggcgaagcgagatgaaatcctgcagactacaccggttgacaccatacgaccctatgggtgtggagaggataaattaaacttatatctacgaaaagttaaagcccgtcccatgttgcacttcagctgcaaggtgatggagcgttcagcgggatatcctggctagtggcttgagcgcacccatagtctaatagggcttttaagccgagagggttctaaatagccgacaattctccctggaatgtgaatatcacatgcattcagctcaggacatcgtctgctgctccagtcatcattccgaccgaaggacgacccgcggacgggatcttggacgcattccacgctgctcgggaggccgccagagatgcccgccactcggctattaggctgatacatgcgtgctttcatttattaatcaaagagaattgtcatattgcaagttaattaatgcatgcaagcttggcctccgcggcctgcggccgcagcttggcgtaatcatggtcatagctgtttcctgtgtgaaattgttatccgctcacaattccacacaacatacgagccggaagcataaagtgtaaagcctggggtgcctaatgagtgagctaactcacattaattgcgttgcgctcactgcccgctttccagtcgggaaacctgtcgtgccagctgcattaatgaatcggccaacgcgcggggagaggcggtttgcgtattgggcgctcttccgcttcctcgctcactgactcgctgcgctcggtcgttcggctgcggcgagcggtatcagctcactcaaaggcggtaatacggttatccacagaatcaggggataacgcaggaaagaacatgtgagcaaaaggccagcaaaaggccaggaaccgtaaaaaggccgcgttgctggcgtttttccataggctccgcccccctgacgagcatcacaaaaatcgacgctcaagtcagaggtggcgaaacccgacaggactataaagataccaggcgtttccccctggaagctccctcgtgcgctctcctgttccgaccctgccgcttaccggatacctgtccgcctttctcccttcgggaagcgtggcgctttctcatagctcacgctgtaggtatctcagttcggtgtaggtcgttcgctccaagctgggctgtgtgcacgaaccccccgttcagcccgaccgctgcgccttatccggtaactatcgtcttgagtccaacccggtaagacacgacttatcgccactggcagcagccactggtaacaggattagcagagcgaggtatgtaggcggtgctacagagttcttgaagtggtggcctaactacggctacactagaaggacagtatttggtatctgcgctctgctgaagccagttaccttcggaaaaagagttggtagctcttgatccggcaaacaaaccaccgctggtagcggtggtttttttgtttgcaagcagcagattacgcgcagaaaaaaaggatctcaagaagatcctttgatcttttctacggggtctgacgctcagtggaacgaaaactcacgttaagggattttggtcatgagattatcaaaaaggatcttcacctagatccttttaaattaaaaatgaagttttaaatcaatctaaagtatatatgagtaaacttggtctgacagttaccaatgcttaatcagtgaggcacctatctcagcgatctgtctatttcgttcatccatagttgcctgactccccgtcgtgtagataactacgatacgggagggcttaccatctggccccagtgctgcaatgataccgcgagacccacgctcaccggctccagatttatcagcaataaaccagccagccggaagggccgagcgcagaagtggtcctgcaactttatccgcctccatccagtctattaattgttgccgggaagctagagtaagtagttcgccagttaatagtttgcgcaacgttgttgccattgctacaggcatcgtggtgtcacgctcgtcgtttggtatggcttcattcagctccggttcccaacgatcaaggcgagttacatgatcccccatgttgtgcaaaaaagcggttagctccttcggtcctccgatcgttgtcagaagtaagttggccgcagtgttatcactcatggttatggcagcactgcataattctcttactgtcatgccatccgtaagatgcttttctgtgactggtgagtactcaaccaagtcattctgagaatagtgtatgcggcgaccgagttgctcttgcccggcgtcaatacgggataataccgcgccacatagcagaactttaaaagtgctcatcattggaaaacgttcttcggggcgaaaactctcaaggatcttaccgctgttgagatccagttcgatgtaacccactcgtgcacccaactgatcttcagcatcttttactttcaccagcgtttctgggtgagcaaaaacaggaaggcaaaatgccgcaaaaaagggaataagggcgacacggaaatgttgaatactcatactcttcctttttcaatattattgaagcatttatcagggttattgtctcatgagcggatacatatttgaatgtatttagaaaaataaacaaataggggttccgcgcacatttccccgaaaagtgccacctgacgtctaagaaaccattattatcatgacattaacctataaaaataggcgtatcacgaggccctttcgtctcgcgcgtttcggtgatgacggtgaaaacctctgacacatgcagctcccggagacggtcacagcttgtctgtaagcggatgccgggagcagacaagcccgtcagggcgcgtcagcgggtgttggcgggtgtcggggctggcttaactatgcggcatcagagcagattgtactgagagtgcaccatatgcggtgtgaaataccgcacagatgcgtaaggagaaaataccgcatcaggcgccattcgccattcaggctgcgcaactgttgggaagggcgatcggtgcgggcctcttcgctattacgccagctggcgaaagggggatgtgctgcaaggcgattaagttgggtaacgccagggttttcccagtcacgacgttgtaaaacgacggccagtgaattggcctccatggccgcggccgcgaattcatc

SEQ ID NO: 60 - DNA, 8678 bp, Thermoascus aurantiacus
  source 1..8678: mol_type = genomic DNA
tcgagcttaagacctggtacatgtgccggcgcgcccgggagatctagagggtgactgacacctggcggtagacaatcaatccatttcgctatagttaaaggatggggatgagggcaattggttatatgatcatgtatgtagtgggtgtgcataatagtagtgaaatggaagccaagtcatgtgattgtaatcgaccgacggaattgaggatatccggaaatacagacaccgtgaaagccatggtctttccttcgtgtagaagaccagacagacagtccctgatttacccttgcacaaagcactagaaaattagcattccatccttctctgcttgctctgctgatatcactgtcattcaatgcatagccatgagctcatcttagatccaagcacgtaattccatagccgaggtccacagtggagcagcaacattccccatcattgctttccccaggggcctcccaacgactaaatcaagagtatatctctaccgtccaatagatcgtcttcgcttcaaaatctttgacaattccaagagggtccccatccatcaaacccagttcaataatagccgagatgcatggtggagtcaattaggcagtattgctggaatgtcgggccagttggcccgggtggtcattggccgcctgtgatgccatctgccactaaatccgatcattgatccaccgcccacgaggcgcgtctttgctttttgcgcggcgtccaggttcaactctctcgctctagatatcgatgaattcactggccgtcgttttacaacgtcgtgactgggaaaaccctggcgttacccaacttaatcgccttgcagcacatccccctttcgccagctggcgtaatagcgaagaggcccgcaccgatcgcccttcccaacagttgcgcagcctgaatggcgaatggcgcctgatgcggtattttctccttacgcatctgtgcggtatttcacaccgcatatggtgcactctcagtacaatctgctctgatgccgcatagttaagccagccccgacacccgccaacacccgctgacgcgccctgacgggcttgtctgctcccggcatccgcttacagacaagctgtgaccgtctccgggagctgcatgtgtcagaggttttcaccgtcatcaccgaaacgcgcgagacgaaagggcctcgtgatacgcctatttttataggttaatgtcatgataataatggtttcttagacgtcaggtggcacttttcggggaaatgtgcgcggaacccctatttgtttatttttctaaatacattcaaatatgtatccgctcatgagacaataaccctgataaatgcttcaataatattgaaaaaggaagagtatgagtattcaacatttccgtgtcgcccttattcccttttttgcggcattttgccttcctgtttttgctcacccagaaacgctggtgaaagtaaaagatgctgaagatcagttgggtgcacgagtgggttacatcgaactggatctcaacagcggtaagatccttgagagttttcgccccgaagaacgttttccaatgatgagcacttttaaagttctgctatgtggcgcggtattatcccgtattgacgccgggcaagagcaactcggtcgccgcatacactattctcagaatgacttggttgacgcgtcaccagtcacagaaaagcatcttacggatggcatgacagtaagagaattatgcagtgctgccataaccatgagtgataacactgcggccaacttacttctgacaacgatcggaggaccgaaggagctaaccgcttttttgcacaacatgggggatcatgtaactcgccttgatcgttgggaaccggagctgaatgaagccataccaaacgacgagcgtgacaccacgatgcctgtagcaatggcaacaacgttgcgcaaactattaactggcgaactacttactctagcttcccggcaacaattaatagactggatggaggcggataaagttgcaggaccacttctgcgctcggcccttccggctggctggtttattgctgataaatctggagccggtgagcgtgggtctcgcggtatcattgcagcactggggccagatggtaagccctcccgtatcgtagttatctacacgacggggagtcaggcaactatggatgaacgaaatagacagatcgctgagataggtgcctcactgattaagcattggtaactgtcagaccaagtttactcatatatactttagattgatttaaaacttcatttttaatttaaaaggatctaggtgaagatcctttttgataatctcatgaccaaaatcccttaacgtgagttttcgttccactgagcgtcagaccccgtagaaaagatcaaaggatcttcttgagatcctttttttctgcgcgtaatctgctgcttgcaaacaaaaaaaccaccgctaccagcggtggtttgtttgccggatcaagagctaccaactctttttccgaaggtaactggcttcagcagagcgcagataccaaatactgtccttctagtgtagccgtagttaggccaccacttcaagaactctgtagcaccgcctacatacctcgctctgctaatcctgttaccagtggctgctgccagtggcgataagtcgtgtcttaccgggttggactcaagacgatagttaccggataaggcgcagcggtcgggctgaacggggggttcgtgcacacagcccagcttggagcgaacgacctacaccgaactgagatacctacagcgtgagctatgagaaagcgccacgcttcccgaagggagaaaggcggacaggtatccggtaagcggcagggtcggaacaggagagcgcacgagggagcttccagggggaaacgcctggtatctttatagtcctgtcgggtttcgccacctctgacttgagcgtcgatttttgtgatgctcgtcaggggggcggagcctatggaaaaacgccagcaacgcggcctttttacggttcctggccttttgctggccttttgctcacatgttctttcctgcgttatcccctgattctgtggataaccgtattaccgcctttgagtgagctgataccgctcgccgcagccgaacgaccgagcgcagcgagtcagtgagcgaggaagcggaagagaggcgcccaatacgcaaaccgcctctccccgcgcgttggccgattcattaatgcagctggcacgacaggtttcccgactggaaagcgggcagtgagcgcaacgcaattaatgtgagttagctcactcattaggcaccccaggctttacactttatgcttccggctcgtatgttgtgtggaattgtgagcggataacaatttcacacaggaaacagctatgaccatgattacgccaagcttgcatgcacaactgcacctcagaagaaaaggatgatcaataccgtacgggagattgtacgaacagatggcccgagaggactattccgagggtgtgctatcaacacgtttatggccgctgtcggatcaggattatactttggtctctacgagagcaccaaatggtggctaggctctgactcgatggataattgtgccgtgttagagtagggggtggtgggaaatcttgtatataattgtgattgtttgtacgatagtgaccgactgtacattagtgataccccactctaagaaaatagaccaatctccagctgcaccttcagacactccggtacaaattctcgtctatgttggagattgttgtgactttgaaacatgacccttgaccctgattttgaatttgtccatatatcgaggcaggtgtcttattcgtacggagagggtatctgtcgtagacacatagtagtagtcatttcgagtgctgaatttataaatcgcatcatacttgcgacatactgccataaaaggagtacgtatccaccactacttattgcgcaccaacacgcttcaggtatgcatcccatccctccttctggtactgcttcgccgcctccacgggatcaggagcagcataaattccacggccagcaataataaagtcggcaccgcgtccaacagccgactcaggagtttggtactgctgtcccagcttgtcacccttcgaggagaggttgacacctgtcgtgaagacgacaaaatcttcctcctccgaaggcgagctaacttcagactgaacctcgccaaggtgacgtgtcgagacgaatcccatcacaaacttcttatacttccgagcatagtcaacagaagaagtagtatattgaccggtagccaaagatcccttggaggtcatctccgcaaggatcaaaaggcccctctcggagccgtaggggaagtcctcggccgaagcagtctgggccagagcctcgacgataccctcaccgggcagaatactgcagttgatgatgtgggcccactcagagatacgcagagtgccgccatggtactgcttttggacgttgtttccgatatcgatgaacttgcgatcttcgaagatgaggaaattgtgcttctctgcaagggccttcagaccggtgatggtttcttcgctgaaatcggagaggatatcgatgtgagttttgatcacggcaatgtacggaccgagtcctgttatataatccaccattaaccattactagatcacatgtaagtggcatccccggtgcgcatacggtcagccaaatccagcagctctttggtggttgtcacgtcggcggaaacggtgacattggttttcttggcctcggcaacctcgaagagcttctttacgagcgcattggggtgcttgctagcgcgtgcgctgtaggtcaattgcgacttggaagacataaaaccgatggaggggtagcgcggggttctgcaaatattgtataaatgagcacttagtggttgaaactggcttattagtaggttagtacttcgagttttcagtaattagacaaaataatcaggatgtccaactactaactcttgatatatggaatgaaatgtagatacaaactgcacgacaattgccgcgaaaaattaaattgaatctatggaggggactgtcatgcactagccacacgtttctccgcctgtggggtgagccacatgcctcattttgaccaaacacatcgatgcagtcacatgtagataagattagggcctatccttagggtaccgtccacgcggggattatgcctggctttttgcctgcttttgatatcctttcagggacatagcaataagcccaaccctatcggccataataatgtcaattccagcagcggcttgggtctagaatatttaatcagctaccgagcaacttctacatcacagtttgaaagcactaaggatcaatatagaagcacttaccttcgcattttctggtatattgttctgagatccataggcctgattaatgattacatacgcctccgggtagtagaccgagcagccgagccagttcagcgcctaaaacgccttatacaattaagcagttaaagaagttagaatctacgcttaaaaagctacttaaaaatcgatctcgcagtcccgattcgcctatcaaaaccagtttaaatcaactgattaaaggtgccgaacgagctataaatgatataacaatattaaagcattaattagagcaatatcaggccgcgcacgaaaggcaacttaaaaagcgaaagcgctctactaaacagattacttttgaaaaaggcacatcagtatttaaagcccgaatccttattaagcgccgaaatcaggcagataaagccatacaggcagatagacctctacctattaaatcggcttctaggcgcgcaatacatggtgttttgatcattttaaatttttatatggcgggtggtgggcaactcgcttgcgcgggcaactcgcttaccgattacgttagggctgatatttacgtaaaaatcgtcaagggatgcaagaccaaaccgttaaatttccggagtcaacagcatccaagcccaagtccttcacggagaaaccccagcgtccacatcacgagcgaaggaccacctctaggcatcggacgcaccatccaattagaagcagcaaagcgaaacagcccaagaaaaaggtcggcccgtcggccttttctgcaacgctgatcacgggcagcgatccaaccaacaccctccagagtgactaggggcggaaatttatcgggattaatttccactcaaccacaaatcacagtcgtccccggtattgtcctgcagacggcaatttaacggcttctgcgaatcgcttggattccccgcccctggccgtagagcttaaagtatgtcccttgacaatgcgatgtatcacatgatataattactagcaagggaagccgtgcttggagtttccaactcaatttacctctatccacacttctcttccttcctcaatcctctatatacacaactggggatccagcggccgcaccatgcgagcaatcggcttgttgcctggcatcatcggtatcgcgggtgccgcatgtccctacatgacaggcgagctccctcggtcgttcgccgaaaaccctcacgccattaacaggcgagcggagggaggaggaggcgcagcagccgaaacagaaaagttcttgtcccagttctatttgaacgataacgacacgttcatgactacggatgtcggtggaccgattgaggaccagaactccctctcggcaggagatcgaggacccaccctcttggaagatttcatcctccgtcagaaaattcagcggttcgaccacgaaagggtgccggaacgcgcagtccatgcccgaggcgcaggtgcccatggcgtgttcacttcctacgcagactggtcgaacatcactgcagcgtcgttcctctccgcagcaggcaaggagacacccgtgttcgtcaggttctcgactgtggcaggctccaggggatcggcagacactgcacgcgatgtccatggtttcgccacaaggttctataccgatgagggtaacttcgatatcgtgggcaacaacattcccgtcttcttcatccaggacgccatccagttccccgacttgatccatgcggtgaagccgtcgcccaacaacgaaattcctcaggcagccacagcacacgattcggcatgggacttcttctcgcagcagccgtcgtcgttgcataccctcttctgggccatggcaggacacggaattcctcggtcctatcgaaacatggacggattcggcatccacaccttcaggttcgtcacagacgatggagcgtcgaagttggtgaagttccactggacctccctccagggcaaggcgtcgttggtctgggaagaagcacaggccgtcgcaggcaaaaacgccgattaccacaggcaggatttgtgggatgcgatcgaagcaggacgctatcctgaatgggaattgggtgtgcagatcatggacgaagaagaccagttgcggttcggattcgatttgttggaccctaccaagatcgtccccgaagaatacgtccccatcaccaaattgggcaagatgcagttgaaccgtaacccgttgaactatttcgcggaaactgaacagattatgttccagcctggccacgtggtgaggggcatcgatttcaccgaggaccctttgctccagggccggttgttctcgtacctcgacacccagctcaaccggcatggcggacccaacttcgagcagattcccatcaaccgacctcgcactccgatccataacaacaacagggatggtgcagcacagatgtacatccccttgaacaaggcagcgtacactcccaacacgctcaacaacggttcgcccaagcaggcgaaccagactgtgggcaagggcttcttcaccactcctggacgcactgcctccggcaggctcgtccgagcggtctcgtcgactttcgcggacgtctggtcgcagcccaggctcttctacaactcgctcgtgcctgccgaacagcagttcctcattaacgcaatccgattcgagacggcccacattacgtcggatgtggtcaagaacaacgtgatcatccagctcaaccgagtctccaacaacttggcgaaacgggtggcaagggcgatcggcgtggccgagcccgaacccgaccccaccttgtaccacaacaacaagacagcaaacgtgggcgtgttcggaaagccgttggccaggctcgacggattgcaggtcggcgtcctcgcaaccgtcaacaagccggactccatcaagcaggcagcctccctcaaggcctcgttcgcagcagataacgtcgacgtcaaagtcgtcgcggagaggctcgcagatggcgtggacgaaacctactccgcagccgatgccgtcaacttcgacgcgatcctcgtggcaaacggagccgagggattgttcgcacgggactcgttcacagcacgccctgcaaactcgaccactgccacactctaccctgcaggccgaccgctccagattttggtggacggattcaggtacggcaagcctgtgggtgcactcggatcgggagcaaaggccctcgatgcagccgaaatctcgactacaagggcaggcgtctatgtcgcgaactcgacaaccgattccttcatcaacggtgtcagggacggcctccgtactttcaaattcctcgatcgcttcgccatcgacgaagacgccgagtgac

SEQ ID NO: 61 - DNA, 1264 bp, Coprinopsis cinerea
  source 1..1264: mol_type = genomic DNA
cccacctgttctactactagtcctcttccatttgatatttgaacgctgtttccgaggtcaagaacgacaactatgaagctctcgcttttgtccaccttcgctgctgtcatcatcggtgccctcgctctaccccagggtcctggaggaggcgggtcagtcacttgccccggtggacagtccacttcgaacagccagtgctgcgtctggttcgacgttctagacgatcttcagaccaacttctaccaagggtccaagtgtgagagccctgttcgcaagattcttagaattgttttccatgacgcgatcggattttcgccggcgttgactgctgctggtcaattcggtggtggaggagctgatggctccatcattgcgcattcgaacatcgaattggccttcccggctaatggcggcctcaccgacaccgtcgaagccctccgcgcggtcggtatcaaccacggtgtctctttcggcgatctcatccaattcgccactgccgtcggcatgtccaactgccctggctctccccgacttgagttcttgacgggcaggagcaacagttcccaaccctcccctccttcgttgatccccggtcccggaaacactgtcactgctatcttggatcgtatgggcgatgcaggcttcagccctgatgaagtagttgacttgcttgctgcgcatagtttggcttctcaggagggtttgaactcggccatcttcaggtctcctttggactcgacccctcaagttttcgatacccagttctacattgagaccttgctcaagggtaccactcagcctggcccttctctcggctttgcagaggagctctcccccttccctggcgaattccgcatgaggtccgatgctctcttggctcgcgactcccgaaccgcctgccgatggcaatccatgaccagcagcaatgaagttatgggccagcgataccgcgccgccatggccaagatgtctgttctcggcttcgacaggaacgccctcaccgattgctctgacgttattccttctgctgtgtccaacaacgctgctcctgttatccctggtggccttactgtcgatgatatcgaggtttcgtgcccgagcgagcctttccctgaaattgctaccgcctcaggccctctcccctccctcgctcctgctccttgatctggtgaagatggtacatcctgcttctctcatcatccctcttagctatttatccaatctatctacctatctatgcagtttctgtccaccctcagttgtg

SEQ ID NO: 62 - DNA, 12205 bp, Aspergillus niger
  source 1..12205: mol_type = genomic DNA
ggatccaccatgaagttgcctctctttgctgctgcagcagctggcctcgccaatgccgcttccctgcctgtcgaaagggccgaggctgaggttgcgtccgtcgccgccgatttaatcgtccgcgccctccccaatgcccccgatggctacactccctccaatgtcacctgtccctcgactcgtccgagcattcgtgatgcctcgggcatctccaccaacgagaccgagtggctcaaggtccgtcgcaatgcgaccctcaccccgatgaagaacctccttagccgtctcaacctcaccggctttgataccacctcctacatcaatgaacactccagcaacatctccaacatccccaacattgcaattgcggcttcgggtggtggataccgtgcgctcaccaacggagctggtgcgctgaaggctttcgacagccgctccgacaatgccaccaactccggtcaactgggtggtctgctgcaggcggcaacctacgtctctggtctgagtggtggtagctggctggtcggatccatgttcgtcaacaacttctcctccatcggtgaattgcaagccagcgagaaggtctggcgcttcgacaagtccctgctcgagggacccaacttcgaccacatccagatcgtcagcacggtggaatactggaaggacattaccgaggaagtcgacggcaaggctaacgctggttttaacacttccttcaccgactactggggccgtgcgctgtcctaccagctggtgaacgcctccgatgacaagggtggtcccgactacacctggtcctccattgcgctcatggacgacttcaagaacggccagtaccccatgcctattgtggtcgccgacggccgcaaccccggcgaaatcatcgttgagaccaatgccaccgtttatgaagtgaacccttgggaattcggctctttcgaccccagcgtctacgccttcgctcccctgcagtatctgggctcccggttcgagaacggctccatcccggacaacggcacctgcgtgagcggcttcgacaatgccggctttatcatgggatcatcctccaccctgttcaaccaattcctcctccaaatcaacagcaccagcatccccacgatcctgaaggatgccttcactgacatcctcgaggacctcggtgagcgcaacgacgatatcgccgtctactcccccaaccccttctccggctaccgcgacagcagcgaggattacgccacagccaaggacctcgacgttgtcgacggtggtgaagacggcgagaacatccctctgcacccgctgatccagcccgagcgtgccgtcgatgtcatcttcgccatcgactcctctgccgacacagactactactggcccaacggtacctcccttgtcgcgacctacgagcgcagtctcgagcccagcatcgccaacggcaccgccttccccgccgtgccggatcagaacaccttcgtcaacctgggtctcaactcccgcccgactttcttcggctgcgaccccaagaacatctccggcaccgcccccctggtcatttatctgcctaacagcccctacacctacgactccaacttctcgaccttcaagctgacctacagcgacgaggagcgtgattccgtcatcaccaacggctggaacgtggtcactcgcggtaacggtaccgttgatgataacttcccgtcttgcgtggcgtgcgctattctccagcgctccacctacaggacgaacacctctctgccagatatctgtaccacctgctttaacgattactgctggaacggcacgacaaacagcactacgcctggagcttatgaacccagtgtgtagcacggcccagatccgggtgactgacacctggcggtagacaatcaatccatttcgctatagttaaaggatggggatgagggcaattggttatatgatcatgtatgtagtgggtgtgcataatagtagtgaaatggaagccaagtcatgtgattgtaatcgaccgacggaattgaggatatccggaaatacagacaccgtgaaagccatggtctttccttcgtgtagaagaccagacagacagtccctgatttacccttgcacaaagcactagaaaattagcattccatccttctctgcttgctctgctgatatcactgtcattcaatgcatagccatgagctcatcttagatccaagcacgtaattccatagccgaggtccacagtggagcagcaacattccccatcattgctttccccaggggcctcccaacgactaaatcaagagtatatctctaccgtccaatagatcgtcttcgcttcaaaatctttgacaattccaagagggtccccatccatcaaacccagttcaataatagccgagatgcatggtggagtcaattaggcagtattgctggaatgtcggggccagttggcccggtggtcattggccgcctgtgatgccatctgccactaaatccgatcattgatccaccgcccacgaggcgcgtctttgctttttgcgcggcgtccaggttcaactctctccactagtggaccagacaggcgccactcggccgggccacagctgcttgggtgttgaccgggagcggaccaattaaggactcgaacgaccgcggggttcaaatgcaaacaagtacaacacgcagcaaacgaagcagcccaccactgcgttgatgcccagtttgactgtccgaaatccaccggaaaggtggaaacatactatgtaacaatcagagggaagaaaaaatttttatcgacgaggcaggatagtgactgatggtggggtcatggtcgggtctccgagcgaaagagaaccaaggaaacaagatcaacgaggttggtgtacccaaaaggccgcagcaacaagagtcatcgcccaaaagtcaacagtctggaagagactccgccgtgcagattctgcgtcggtcccgcacatgcgtggtgggggcattacccctccatgtccaatgataagggcggcggtcgagggcttaagcccgcccactaattcgccttctcgcttgcccctccatataaggattccccctccttcccctcccacaacttttttccttctttctctcttcgtccgcatcagtacgtatatctttcccccatacctcctttcctactcttcttccattcattcaactcttctccttactgacatctgttttgctcagtacctctacgcgatcagccgtagtatctgagcaagcttctctacagaatctttctagtatcttacaaagaactacaaagttcgcaccaggtaccacagaatgcctcaatcctgggaagaactggccgctgataagcgcgcccgcctcgcaaaaaccatccctgatgaatggaaagtccagacgctgcctgcggaagacagcgttattgatttcccaaagaaatcgggtatcctttcagaggccgaactgaagatcacagaggcctccgctgcagatcttgtgtccaagctggcggccggagagttgacctcggtggaagttacgctagcattctgtaaacgggcagcaatcgcccagcagttagtagggtcccctctacctctcagggagatgtaacaacgccaccttatgggactatcaagctgacgctggcttctgtgcagacaaactgcgcccacgagttcttccctgacgccgctctcgcgcaggcaagggaactcgatgaatactacgcaaagcacaagagacccgttggtccactccatggcctccccatctctctcaaagaccagcttcgagtcaaggtacaccgttgcccctaagtcgttagatgtccctttttgtcagctaacatatgccaccagggctacgaaacatcaatgggctacatctcatggctaaacaagtacgacgaaggggactcggttctgacaaccatgctccgcaaagccggtgccgtcttctacgtcaagacctctgtcccgcagaccctgatggtctgcgagacagtcaacaacatcatcgggcgcaccgtcaacccacgcaacaagaactggtcgtgcggcggcagttctggtggtgagggtgcgatcgttgggattcgtggtggcgtcatcggtgtaggaacggatatcggtggctcgattcgagtgccggccgcgttcaacttcctgtacggtctaaggccgagtcatgggcggctgccgtatgcaaagatggcgaacagcatggagggtcaggagacggtgcacagcgttgtcgggccgattacgcactctgttgagggtgagtccttcgcctcttccttcttttcctgctctataccaggcctccactgtcctcctttcttgctttttatactatatacgagaccggcagtcactgatgaagtatgttagacctccgcctcttcaccaaatccgtcctcggtcaggagccatggaaatacgactccaaggtcatccccatgccctggcgccagtccgagtcggacattattgcctccaagatcaagaacggcgggctcaatatcggctactacaacttcgacggcaatgtccttccacaccctcctatcctgcgcggcgtggaaaccaccgtcgccgcactcgccaaagccggtcacaccgtgaccccgtggacgccatacaagcacgatttcggccacgatctcatctcccatatctacgcggctgacggcagcgccgacgtaatgcgcgatatcagtgcatccggcgagccggcgattccaaatatcaaagacctactgaacccgaacatcaaagctgttaacatgaacgagctctgggacacgcatctccagaagtggaattaccagatggagtaccttgagaaatggcgggaggctgaagaaaaggccgggaaggaactggacgccatcatcgcgccgattacgcctaccgctgcggtacggcatgaccagttccggtactatgggtatgcctctgtgatcaacctgctggatttcacgagcgtggttgttccggttacctttgcggataagaacatcgataagaagaatgagagtttcaaggcggttagtgagcttgatgccctcgtgcaggaagagtatgatccggaggcgtaccatggggcaccggttgcagtgcaggttatcggacggagactcagtgaagagaggacgttggcgattgcagaggaagtggggaagttgctgggaaatgtggtgactccatagctcgagatctagagggtgactgacacctggcggtagacaatcaatccatttcgctatagttaaaggatggggatgagggcaattggttatatgatcatgtatgtagtgggtgtgcataatagtagtgaaatggaagccaagtcatgtgattgtaatcgaccgacggaattgaggatatccggaaatacagacaccgtgaaagccatggtctttccttcgtgtagaagaccagacagacagtccctgatttaccctgcacaaagcactagaaaattagcattccatccttctctgcttgctctgctgatatcactgtcattcaatgcatagccatgagctcatcttagatccaagcacgtaattccatagccgaggtccacagtggagcagcaacattccccatcattgctttccccaggggcctcccaacgactaaatcaagagtatatctctaccgtccaatagatcgtcttcgcttcaaaatctttgacaattccaagagggtccccatccatcaaacccagttcaataatagccgagatgcatggtggagtcaattaggcagtattgctggaatgtcggggccagttggccgggtggtcattggccgcctgtgatgccatctgccactaaatccgatcattgatccaccgcccacgaggcgcgtctttgctttttgcgcggcgtccaggttcaactctctccttgaagttcctattccgagttcctattcttcaaatagtataggaacttcacctagcaaagtattttcggtacgattttgacatttgctccattgtcgaggatggatggaacgagcggcgtgcgccacgaaagtgaggctattgcctatcagctctttgctacattccggaaacaaacatccctttttgtgaattatctacgcaacttagatggcgtgaacgcatcttcaaagtctttcggcaggtccggcacgacttttgcatccagagaagcgcctacatgtgtattcgaccacctcctagcgcgcttggatatgaggaaatattactgagagtcgaaaacaagctccaccgcaccagctcttcttggagttttatattaaagaatattcccagctcgttgtattattctttttctaccgtgctaatgtatcaaggactttggtacctattaacgttattattcgtgtgctattcccaaacataaccctgtatatgtttcgaacgccgttatgacccatgtcttacatactcattaagtcattcccttggataatctcgactcagatgcggcggttgatgtaggaggagaggtaatcgaggacctcctgggagatgatgccgttccaggcggggtagcggatggagccctcggcggagcccttgagctgctcgatatgctgccactcctcgatggggttggtctcatccttgagggcgatcatctccttggagatgggatcgtaggcgtagtagcgggagactagtgcgaagtaatgatcggggatggcggtgatctgatgggtgtaggtggtgcgggcgacggcggaggcgcgcttatcggaccagttgccgacgacgttggtgagctcggtgaggcccttcatggagaggaaggaggtcatgagatggcggccgatatgggacttggggccgttcttgatggcgaagatggagtagggggcgttcttcttgagggccttgttgtaggagcggacgaggttatccttgaggagctggtactcctgcttgttggaggaggagttgccggtgcggttgacgcgcttgaggacgggctcggagttgcggaggaactcatcgaggtagacgaggggatcgatgcggccgcgggcggagaagaagtagatatggcgggagacggaggtcttggtctcggtgacgaggcactggatgatgacgccgaggtacttgttctggacgagcttgaaggacttgggatcgacgttcttgatatcggagaagcggccgcagttgatgaaggtggcgaggaagaggaactggtagagggtcttggtcttggtgaagcgggaggtgtactcgaaggagttgaggatcttctcggtgatctcccagatggactcgccctcggagaggagggccttgagcatcttcttggaatgggagttgcccttatcggcctcctcggaggactcgaactggagctggagggaggagacgatatcggtgatatcggactgatgcttctggccgtagtaggggatgatggtgaactcccaggcggggatgagcttcttgagggaggcctccaggatggtggccttctgggtcttgtacttgaactggagggacttgttgacgatatcgaaggagagggagttggagatgatggtgttgtaggacatgaaggtggcgcgcttgatggcggtgccgttatgggtgatcatccagcagaggtaggtgagctcggcggcgcagagggcgatcttctcgccggaggggcgctcgaagcgctcgacgaactggcggacgaggaccttggggggggtcttgcagaggatatcgaactggggcatggtggatcgatccttatgttttgacaaagcgacagaacagcgtcccaagcacagcttgactatccagagaacgctgtccctgacgacgattcttaaatatttgcgttcagcatgactccagagccttgagcaccttgcacggcagatcaacccacgaactacccttctaatcccgtatgatgcttgatggatgccaaatggagccggcaattaatccatctgccaggaacgggggtatacaacatctctcattggccgaaactccgatcagttcgggggccaggatttaaccctggtcccctttaattgttgcagaacaacaaatctccgacacgggactactgactgttaactgaatacgcctgatagtgggggtaagaaacaacgcccgaaccttgttatgactcgtggaggacgcgacggattgctcggggggtggtgagccggggttaacagggtaagctgcaggctgcccgttagggcgcctcgcttggcgaagcgagatgaaatcctgcagactacaccggttgacaccatacgaccctatgggtgtggagaggataaattaaacttatatctacgaaaagttaaagcccgtcccatgttgcacttcagctgcaaggtgatggagcgttcagcgggatatcctggctagtggcttgagcgcacccatagtctaatagggcttttaagccgagagggttctaaatagccgacaattctccctggaatgtgaatatcacatgcattcagctcaggacatcgtctgctgctccagtcatcattccgaccgaaggacgacccgcggacgggatcttggacgcattccacgctgctcgggaggccgccagagatgcccgccactcggctattaggctgatacatgcgtgctttcatttattaatcaaagagaattgtcatattgcaagttaattaatgcatgcaagcttggcctccgcggcctgcggccgcagcttggcgtaatcatggtcatagctgtttcctgtgtgaaattgttatccgctcacaattccacacaacatacgagccggaagcataaagtgtaaagcctggggtgcctaatgagtgagctaactcacattaattgcgttgcgctcactgcccgctttccagtcgggaaacctgtcgtgccagctgcattaatgaatcggccaacgcgcggggagaggcggtttgcgtattgggcgctcttccgcttcctcgctcactgactcgctgcgctcggtcgttcggctgcggcgagcggtatcagctcactcaaaggcggtaatacggttatccacagaatcaggggataacgcaggaaagaacatgtgagcaaaaggccagcaaaaggccaggaaccgtaaaaaggccgcgttgctggcgtttttccataggctccgcccccctgacgagcatcacaaaaatcgacgctcaagtcagaggtggcgaaacccgacaggactataaagataccaggcgtttccccctggaagctccctcgtgcgctctcctgttccgaccctgccgcttaccggatacctgtccgcctttctcccttcgggaagcgtggcgctttctcatagctcacgctgtaggtatctcagttcggtgtaggtcgttcgctccaagctgggctgtgtgcacgaaccccccgttcagcccgaccgctgcgccttatccggtaactatcgtcttgagtccaacccggtaagacacgacttatcgccactggcagcagccactggtaacaggattagcagagcgaggtatgtaggcggtgctacagagttcttgaagtggtggcctaactacggctacactagaaggacagtatttggtatctgcgctctgctgaagccagttaccttcggaaaaagagttggtagctcttgatccggcaaacaaaccaccgctggtagcggtggtttttttgtttgcaagcagcagattacgcgcagaaaaaaaggatctcaagaagatcctttgatcttttctacggggtctgacgctcagtggaacgaaaactcacgttaagggattttggtcatgagattatcaaaaaggatcttcacctagatccttttaaattaaaaatgaagttttaaatcaatctaaagtatatatgagtaaacttggtctgacagttaccaatgcttaatcagtgaggcacctatctcagcgatctgtctatttcgttcatccatagttgcctgactccccgtcgtgtagataactacgatacgggagggcttaccatctggccccagtgctgcaatgataccgcgagacccacgctcaccggctccagatttatcagcaataaaccagccagccggaagggccgagcgcagaagtggtcctgcaactttatccgcctccatccagtctattaattgttgccgggaagctagagtaagtagttcgccagttaatagtttgcgcaacgttgttgccattgctacaggcatcgtggtgtcacgctcgtcgtttggtatggcttcattcagctccggttcccaacgatcaaggcgagttacatgatcccccatgttgtgcaaaaaagcggttagctccttcggtcctccgatcgttgtcagaagtaagttggccgcagtgttatcactcatggttatggcagcactgcataattctcttactgtcatgccatccgtaagatgcttttctgtgactggtgagtactcaaccaagtcattctgagaatagtgtatgcggcgaccgagttgctcttgcccggcgtcaatacgggataataccgcgccacatagcagaactttaaaagtgctcatcattggaaaacgttcttcggggcgaaaactctcaaggatcttaccgctgttgagatccagttcgatgtaacccactcgtgcacccaactgatcttcagcatcttttactttcaccagcgtttctgggtgagcaaaaacaggaaggcaaaatgccgcaaaaaagggaataagggcgacacggaaatgttgaatactcatactcttcctttttcaatattattgaagcatttatcagggttattgtctcatgagcggatacatatttgaatgtatttagaaaaataaacaaataggggttccgcgcacatttccccgaaaagtgccacctgacgtctaagaaaccattattatcatgacattaacctataaaaataggcgtatcacgaggccctttcgtctcgcgcgtttcggtgatgacggtgaaaacctctgacacatgcagctcccggagacggtcacagcttgtctgtaagcggatgccgggagcagacaagcccgtcagggcgcgtcagcgggtgttggcgggtgtcggggctggcttaactatgcggcatcagagcagattgtactgagagtgcaccatatgcggtgtgaaataccgcacagatgcgtaaggagaaaataccgcatcaggcgccattcgccattcaggctgcgcaactgttgggaagggcgatcggtgcgggcctcttcgctattacgccagctggcgaaagggggatgtgctgcaaggcgattaagttgggtaacgccagggttttcccagtcacgacgttgtaaaacgacggccagtgaattggcctccatggccgcggccgcgaattcatcttgaagttcctattccgagttcctattctctagaaagtataggaacttcgctagcccgttaaattgccgtcgtcagccgttaaattaccgattaatcccgataaatttccgagatctccgttaaattgccgttcgcagccgttaaattaccggggacgaccgataaatttccgcgatgaattcatggtgttttgatcattttaaatttttatatggcgggtggtgggcaactcgcttgcgcgggcaactcgcttaccgattacgttagggctgatatttacgtaaaaatcgtcaagggatgcaagaccaaaccgttaaatttccggagtcaacagcatccaagcccaagtccttcacggagaaaccccagcgtccacatcacgagcgaaggaccacctctaggcatcggacgcaccatccaattagaagcagcaaagcgaaacagcccaagaaaaaggtcggcccgtcggccttttctgcaacgctgatcacgggcagcgatccaaccaacaccctccagagtgactaggggcggaaatttatcgggattaatttccactcaaccacaaatcacagtcgtccccggtaatttaacggctgcagacggcaatttaacggcttctgcgaatcgcttggattccccgcccctggccgtagagcttaaagtatgtcccttgtcgatgcgatgtatcacaacatataaatactggcaagggatgccatgcttggagcaacaatctcagaacaccaatatcaattcatctcgagtctgaactcagacaacacaaattcttcaaaattgaggatttagtcttgatc

SEQ ID NO: 63 - DNA, 1620 bp, unidentified
  source 1..1620: mol_type = genomic DNA
atgaaacaacaaaaacggctttacgcccgattgctgacgctgttatttgcgctcatcttcttgctgcctcattctgcagccgcggcaccgtttaacggcaccatgatgcagtattttgaatggtacttgccggatgatggcacgttatggaccaaagtggccaatgaagccaacaacttatccagccttggcatcaccgctctttggctgccgcccgcttacaaaggaacaagccgcagcgacgtagggtacggagtatacgacttgtatgacctcggcgaattcaatcaaaaagggaccgtccgcacaaaatacggaacaaaagctcaatatcttcaagccattcaagccgcccacgccgctggaatgcaagtgtacgccgatgtcgtgttcgaccataaaggcggcgctgacggcacggaatgggtggacgccgtcgaagtcaatccgtccgaccgcaaccaagaaatctcgggcacctatcaaatccaagcatggacgaaatttgattttcccgggcggggcaacacctactccagctttaagtggcgctggtaccattttgacggcgttgattgggacgaaagccgaaaattgagccgcatttacaaattccgtggcaaggcttgggattgggaagtagacacggaattcggaaactatgactacttaatgtatgccgaccttgatatggatcatcccgaagtcgtgaccgagctgaaaaactgggggaaatggtatgtcaacacaacgaacattgatgggttccggcttgatgccgtcaagcatattaagttcagtttttttcctgattggttgtcgtatgtgcgttctcagactggcaagccgctatttaccgtcggggaatattggagctatgacatcaacaagttgcacaattacattacgaaaacagacggaacgatgtctttgtttgatgccccgttacacaacaaattttataccgcttccaaatcagggggcgcatttgatatgcgcacgttaatgaccaatactctcatgaaagatcaaccgacattggccgtcaccttcgttgataatcatgacaccgaacccggccaagcgctgcaatcatgggtcgacccatggttcaaaccgttggcttacgcctttattctaactcggcaggaaggatacccgtgcgtcttttatggtgactattatggcattccacaatataacattccttcgctgaaaagcaaaatcgatccgctcctcatcgcgcgcagggattatgcttacggaacgcaacatgattatcttgatcactccgacatcatcgggtggacaagggaagggggcactgaaaaaccaggatccggactggccgcactgatcaccgatgggccgggaggaagcaaatggatgtacgttggcaaacaacacgctggaaaagtgttctatgaccttaccggcaaccggagtgacaccgtcaccatcaacagtgatggatggggggaattcaaagtcaatggcggttcggtttcggtttgggttcctagaaaaacgaccgtttctaccatcgctcggccgatcacaacccgaccgtggactggtgaattcgtccgttggaccgaaccacggttggtggcatggcct

SEQ ID NO: 64 - DNA, 9773 bp, Sutcliffiella halmapala
  source 1..9773: mol_type = genomic DNA
tctggttgttttcttcatttcaggtttcgccctttccttgccaaatataagaaaaacggcgttccgataatcgcggtgacaatgccgaccggtgattcataaggaaatgcaatccatctggccagaacatctgcgtacaccagcaaaatggcaccgaacagtgccgaaaacggaagcacgtattgataatgttctccgatcagcttgcggacaatatgcgggacgagcagcccgacaaagccaatcggcccggcgacggctacggaagcgccggaaagaattaaaataatcaaactgatcagaatcctgatgccgttcatattttgtccaagcccttttgctgtttcgtctccgagaccgagaacagaaacagaaccggaaaatacgagggcaagcccgatgccaatgacagaaaaaggagcgatggttatgacgtcctgccagttgctgccgtcgattgcgcctgtcatccagtacagaacatcctcacctgactcatttaaaataatgatggcctgtgtcatagaggagaggaacaagtgcacggccattcctgacagcgccagcttgacaggcgtcattccgccggatgaggcaatcatatacacaatcgcgccgcctgctgccgcacccgcaaaagcgaatataacagatgaatagggcgatgccggcagaatgacgagagaagcaacaacaaaaagcgatgcacccgcattcacaccgaaaatttggggtgaagccagaggatttctggtcatagcctgcatcagcgcccctgctacagctaggctggcgccgacaaaaacgccgattaatgtgcggggaaggcgaagagtagagatgatgagctgttcctttgaaccgtcccatacaaaaagatatttcaatgaatctatgatgctgatgtctgaggctcctactgaaagattcagcccaagcccaaatataaaaataatcagtgcaatgataaacatcatcagtcttgatgatgagcgccgtttggctgaatgatacaacagtctcacttccttactgcgtctggttgcaaaaacgaagaagcaaggattcccctcgcttctcatttgtcctatttattatacacttttttaagcacatctttggcgcttgtttcactagacttgatgcctctgaatcttgtccaagtgtcacggtccgcatcatagacttgtccatttttcaccgctttgagatttttccagagcgggttcgttttccactcatctacaatggttttgccttcgttggctgagatgaacaaaatatcaggatcgattttgctcaattgctcaaggctgacctcttgataggcgttatctgacttcacagcgtgtgtaaagcctagcattttaaagatttctccgtcataggatgatgatgtatgaagctggaaggaatccgctcttgcaacgccgagaacgatgttgcggttttcatctttcggaagttcggcttttagatcgttgatgacttttttgtgctcggcaagcttttcttttccttcatcttctttatttaatgctttagcaatggtcgtaaagctgtcgatcgtttcgtcatatgtcgcttcacggctttttaattcaatcgtcggggcgatttttttcagctgtttataaatgtttttatggcgctcagcgtcagcgatgattaaatcaggcttcaaggaactgatgacctcaagattgggttcgctgcgtgtgcctacagatgtgtaatcaatggagctgccgacaagctttttaatcatatcttttttgttgtcatctgcgatgcccaccggcgtaatgccgagattgtgaacggcatccaagaatgaaagctcaagcacaaccacccgcttaggtgtgccgcttactgtcgtttttccttcttcgtcatggatcactctggaatccttagactcgcttttgccgcttccgttgttattctggcttgatgaacagccggatacaatgaggcaggcgagcaataaaacactcatgatggcaatcaacttgttagaataggtgcgcatgtcattcttccttttttcagatttagtaatgagaatcattatcacatgtaacactataatagcatggcttatcatgtcaatatttttttagtaaagaaagctgcgtttttactgctttctcatgaaagcatcatcagacacaaataagtggtatgcagcgttaccgtgtcttcgagacaaaaacgcatgggcgttggctttagaggtttcgaacatatcagcagtgacataaggaaggagagtgctgagataaccggacaatttcttttctatttcatctgttagtgcaaattcaatgtcgccgatattcatgataatcgagaaaacaaagtcgatatcgatatgaaaatgttcctcggcaaaaaccgcaagctcgtgaattcctggtgaacatccggcacgcttatggaaaatctgtttgactaaatcactcacaatccaagcattgtattgctgttctggtgaaaagtattgcattagacatacctcctgctcgtacggataaaggcagcgtttcatggtcgtgtgctccgtgcagcggcttctccttaattttgatttttctgaaaataggtcccgttcctatcactttaccatggacggaaaacaaatagctactaccattcctcctgtttttctcttcaatgttctggaatctgtttcaggtacagacgatcgggtatgaaagaaatatagaaaacatgaaggaggaatatcgacatgaaaccagttgtaaaagagtatacaaatgacgaacagctcatgaaagatgtagaggaattgcagaaaatgggtgttgcgaaagaggatgtatacgtcttagctcacgacgatgacagaacggaacgcctggctgacaacacgaacgccaacacgatcggagccaaagaaacaggtttcaagcacgcggtgggaaatatcttcaataaaaaaggagacgagctccgcaataaaattcacgaaatcggtttttctgaagatgaagccgctcaatttgaaaaacgcttagatgaaggaaaagtgcttctctttgtgacagataacgaaaaagtgaaagcttgggcataaagcaaggaaaaaaccaaaaggccaatgtcggccttttggtttttttgcggtctttgcggtgggattttgcagaatgccgcaataggatagcggaacattttcggttctgaatgtccctcaatttgctattatatttttgtgataaattggaataaaatctcacaaaatagaaaatgggggtacatagtggatgaaaaaagtgatgttagctacggctttgtttttaggattgactccagctggcgcgaacgcagctgatttaggccaccagacgttgggatccaatgatggctggggcgcgtactcgaccggcacgacaggcggatcaaaagcatcctcctcaaatgtgtataccgtcagcaacagaaaccagcttgtctcggcattagggaaggaaacgaacacaacgccaaaaatcatttatatcaagggaacgattgacatgaacgtggatgacaatctgaagccgcttggcctaaatgactataaagatccggagtatgatttggacaaatatttgaaagcctatgatcctagcacatggggcaaaaaagagccgtcggggacacaagaagaagcgagagcacgctctcagaaaaaccaaaaagcacgggtcatggtggatatccctgcaaacacgacgatcgtcggttcagggactaacgctaaagtcgtgggaggaaacttccaaatcaagagtgataacgtcattattcgcaacattgaattccaggatgcctatgactattttccgcaatggttgtaaaacgacggccagtgaattctgatcaaatggttcagtgagagcgaagcgaacacttgattttttaattttctatcttttataggtcattagagtatacttatttgtcctataaactatttagcagcataatagatttattgaataggtcatttaagttgagcatattaggggaggaaaatcttggagaaatatttgaagaacccgaggatctagatcaggtaccgcaacgttcgcagatgctgctgaagagattattaaaaagctgaaagcaaaaggctatcaattggtaactgtatctcagcttgaagaagtgaagaagcagagaggctattgaataaatgagtagaaagcgccatatcggcgcttttcttttggaagaaaatatagggaaaatggtacttgttaaaaattcggaatatttatacaatatcatatgtatcacattgaaagggaggagaatcatgaaacaacaaaaacggctttacgcccgattgctgacgctgttatttgcgctcatcttcttgctgcctcattctgcagccgcggcacatcataatgggacaaatgggacgatgatgcaatactttgaatggcacttgcctaatgatgggaatcactggaatagattaagagatgatgctagtaatctaagaaatagaggtataaccgctatttggattccgcctgcctggaaagggacttcgcaaaatgatgtggggtatggagcctatgatctttatgatttaggggaatttaatcaaaaggggacggttcgtactaagtatgggacacgtagtcaattggagtctgccatccatgctttaaagaataatggcgttcaagtttatggggatgtagtgatgaaccataaaggaggagctgatgctacagaaaacgttcttgctgtcgaggtgaatccaaataaccggaatcaagaaatatctggggactacacaattgaggcttggactaagtttgattttccagggaggggtaatacatactcagactttaaatggcgttggtatcatttcgatggtgtagattgggatcaatcacgacaattccaaaatcgtatctacaaattccgaggtaaagcttgggattgggaagtagattcggaaaatggaaattatgattatttaatgtatgcagatgtagatatggatcatccggaggtagtaaatgagcttagaagatggggagaatggtatacaaatacattaaatcttgatggatttaggatcgatgcggtgaagcatattaaatatagctttacacgtgattggttgacccatgtaagaaacgcaacgggaaaagaaatgtttgctgttgctgaattttggaaaaatgatttaggtgccttggagaactatttaaataaaacaaactggaatcattctgtctttgatgtcccccttcattataatctttataacgcgtcaaatagtggaggcaactatgacatggcaaaacttcttaatggaacggttgttcaaaagcatccaatgcatgccgtaacttttgtggataatcacgattctcaacctggggaatcattagaatcatttgtacaagaatggtttaagccacttgcttatgcgcttattttaacaagagaacaaggctatccctctgtcttctatggtgactactatggaattccaacacatagtgtcccagcaatgaaagccaagattgatccaatcttagaggcgcgtcaaaattttgcatatggaacacaacatgattattttgaccatcataatataatcggatggacacgtgaaggaaataccacgcatcccaattcaggacttgcgactatcatgtcggatgggccagggggagagaaatggatgtacgtagggcaaaataaagcaggtcaagtttggcatgacataactggaaataaaccaggaacagttacgatcaatgcagatggatgggctaatttttcagtaaatggaggatctgtttccatttgggtgaaacgataaatcaataaaaaaacgctgtgcggttaaagggcacagcgtttttttgtgtatcggcaatagttacccttattatcaagataagaaagaaaaggatttttcgctacgctcaaatcctttaaaaaaacacaaaagaccacattttttaatgtggtctttattcttcaactaaagcacccattagttcaacaaacgaaaattggataaagtgggatatttttaaaatatatatttatgttacagtaatattgacttttaaaaaaggattgattctaatgaagaaagcagacaagtaagcctcctaaattcactttagataaaaatttaggaggcatatcaaatgaactttaataaaattgatttagacaattggaagagaaaagagatatttaatcattatttgaaccaacaaacgacttttagtataaccacagaaattgatattagtgttttataccgaaacataaaacaagaaggatataaattttaccctgcatttattttcttagtgacaagggtgataaactcaaatacagcttttagaactggttacaatagcgacggagagttaggttattgggataagttagagccactttatacaatttttgatggtgtatctaaaacattctctggtatttggactcctgtaaagaatgacttcaaagagttttatgatttatacctttctgatgtagagaaatataatggttcggggaaattgtttcccaaaacacctatacctgaaaatgctttttctctttctattattccatggacttcatttactgggtttaacttaaatatcaataataatagtaattaccttctacccattattacagcaggaaaattcattaataaaggtaattcaatatatttaccgctatctttacaggtacatcattctgtttgtgatggttatcatgcaggattgtttatgaactctattcaggaattgtcagataggcctaatgactggcttttatatatgagataatgccgactgtactttttacagtcggttttctaacgatacattaataggtacgaaaaagcaactttttttgcgcttaaaaccagtcataccaataacttaagggtaactagcctcgccggaaagagcgaaaatgcctcacatttgtgccacctaaaaaggagcgatttacatatgagttatgcagtttgtagaatgcaaaaagtgaaatcagctggactaaaaggggccgcagagtagaatggaaaaggggatcggaaaacaagtatataggaggagacctatttatggcttcagaaaaagacgcaggaaaacagtcagcagtaaagcttgttccattgcttattactgtcgctgtgggactaatcatctggtttattcccgctccgtccggacttgaacctaaagcttggcatttgtttgcgatttttgtcgcaacaattatcggctttatctccaagcccttgccaatgggtgcaattgcaatttttgcattggcggttactgcactaactggaacactatcaattgaggatacattaagcggattcgggaataagaccatttggcttatcgttatcgcattctttatttcccggggatttatcaaaaccggtctcggtgcgagaatttcgtatgtattcgttcagaaattcggaaaaaaaacccttggactttcttattcactgctattcagtgatttaatactttcacctgctattccaagtaatacggcgcgtgcaggaggcattatatttcctattatcagatcattatccgaaacattcggatcaagcccggcaaatggaacagagagaaaaatcggtgcattcttattaaaaaccggttttcaggggaatctgatcacatctgctatgttcctgacagcgatggcggcgaacccgctgattgccaagctggcccatgatgtcgcaggggtggacttaacatggacaagctgggcaattgccgcgattgtaccgggacttgtaagcttaatcatcacgccgcttgtgatttacaaactgtatccgccggaaatcaaagaaacaccggatgcggcgaaaatcgcaacagaaaaactgaaagaaatgggaccgttcaaaaaatcggagctttccatggttatcgtgtttcttttggtgcttgtgctgtggatttttggcggcagcttcaacatcgacgctaccacaaccgcattgatcggtttggccgttctcttattatcacaagttctgacttgggatgatatcaagaaagaacagggcgcttgggatacgctcacttggtttgcggcgcttgtcatgctcgccaacttcttgaatgaattaggcatggtgtcttggttcagtaatgccatgaaatcatccgtatcagggttctcttggattgtggcattcatcattttaattgttgtgtattattactctcactatttctttgcaagtgcgacagcccacatcagtgcgatgtattcagcatttttggctgtcgtcgtggcagcgggcgcaccgccgcttttagcagcgctgagcctcgcgttcatcagcaacctgttcgggtcaacgactcactacggttctggagcggctccggtcttcttcggagcaggctacatcccgcaaggcaaatggtggtccatcggatttatcctgtcgattgttcatatcatcgtatggcttgtgatcggcggattatggtggaaagtactaggaatatggtagaaagaaaaaggcagacgcggtctgcctttttttattttcactccttcgtaagaaaatggattttgaaaaatgagaaaattccctgtgaaaaatggtatgatctaggtagaaaggacggctggtgctgtggtgaaaaagcggttccatttttccctgcaaacaaaaataatggggctgattgcggctctgctggtctttgtcattggtgtgctgaccattacgttagccgttcagcatacacagggagaacggagacaggcagagcagctggcggttcaaacggcgagaaccatttcctatatgccgccggttaaagagctcattgagagaaaagacggacatgcggctcagacgcaagaggtcattgaacaaatgaaagaacagactggtgcgtttgccatttatgttttgaacgaaaaaggagacattcgcagcgcctctggaaaaagcggattaaagaaactggagcgcagcagagaaattttgtttggcggttcgcatgtttctgaaacaaaagcggatggacgaagagtgatcagagggagcgcgccgattataaaagaacagaagggatacagccaagtgatcggcagcgtgtctgttgattttctgcaaacggagacagagcaaagcatcaaaaagcatttgagaaatttgagtgtgattgctgtgcttgtactgctgctcggatttattggcgccgccgtgctggcgaaaagcatcagaaaggatacgctcgggcttgaaccgcatgagatcgcggctctatatcgtgagaggaacgcaatgcttttcgcgattcgagaagggattattgccaccaatcgtgaaggcgtcgtcaccatgatgaacgtatcggcggccgagatgctgaagctgcccgagcctgtgatccatcttcctatagatgacgtcatgccgggagcagggctgatgtctgtgcttgaaaaaggagaaatgctgccgaaccaggaagtaagcgtcaacgatcaagtgtttattatcaatacgaaagtgatgaatcaaggcgggcaggcgtatgggattgtcgtcagcttcagggagaaaacagagctgaagaagctgatcgacacattgacagaggttcgcaaatattcagaggatctcagggcgcagactcatgaattttcaaataagctttatgcgattttagggctgcgtcgac

SEQ ID NO: 65 - DNA, 2604 bp, Bacillus amyloliquefaciens
  source 1..2604: mol_type = genomic DNA
aagcttcaagcggtcaatcggaatgtgcatctcgcttcatacttaggttttcacccgcatattaagcaggcgtttttgaaccgtgtgacagaagctgttcgaaaccccggcgggcggtttgattttaaggggggacagtatgctgcctcttcacattaatctcagcggaaaaagaatcatcattgctggcgggggcaatgttgcattaagaaggctgaaacggtgtttccggaaggcgctgatattaccgtgatcagtctgagcctgcctgaaattaaaaagctggcggatgaaggacgcatccgctggattccccggagaattgaaatgaaagatctcaagcccgcttttttcattattgccgcgacaaatgaccgaggcgtgaatcaggagatagccgcaaacgcttctgaaacgcagctggtcaactgtgtaagcaaggctgaacaaggcagcgtatatatgccgaagatcatccgcaaagggcgcattcaagtatcagtatcaacaagcggggcaagccccgcacatacgaaaagactggctgaaaacattgagcctttgatgactgatgatttggctgaagaagtggatcgattgtttgagaaaagaagaagaccataaaaataccttgtctgtcatcagacagggtattttttatgctgtccagactgtccgctgtgtaaaaaataggaataaaggggggttgttattattttactgatatgtaaaatataatttgtataagaaaatgagagggagaggaaacatgattcaaaaacgaaagcggacagtttcgttcagacttgtgcttatgtgcacgctgttatttgtcagtttgccgattacaaaaacatcagccgtaaatggcacgctgatgcagtattttgaatggtatacgccgaacgacggccagcattggaaacgattgcagaatgatgcggaacatttatcggatatcggaatcactgccgtctggattcctcccgcatacaaaggattgagccaatccgataacggatacggaccttatgatttgtatgatttaggagaattccagcaaaaagggacggtcagaacgaaatacggcacaaaatcagagcttcaagatgcgatcggctcactgcattcccggaacgtccaagtatacggagatgtggttttgaatcataaggctggtgctgatgcaacagaagatgtaactgccgtcgaagtcaatccggccaatagaaatcaggaaacttcggaggaatatcaaatcaaagcgtggacggattttcgttttccgggccgtggaaacacgtacagtgattttaaatggcattggtatcatttcgacggagcggactgggatgaatcccggaagatcagccgcatctttaagtttcgtggggaaggaaaagcgtgggattgggaagtatcaagtgaaaacggcaactatgactatttaatgtatgctgatgttgactacgaccaccctgatgtcgtggcagagacaaaaaaatggggtatctggtatgcgaatgaactgtcattagacggcttccgtattgatgccgccaaacatattaaattttcatttctgcgtgattgggttcaggcggtcagacaggcgacgggaaaagaaatgtttacggttgcggagtattggcagaataatgccgggaaactcgaaaactacttgaataaaacaagctttaatcaatccgtgtttgatgttccgcttcatttcaatttacaggcggcttcctcacaaggaggcggatatgatatgaggcgtttgctggacggtaccgttgtgtccaggcatccggaaaaggcggttacatttgttgaaaatcatgacacacagccgggacagtcattggaatcgacagtccaaacttggtttaaaccgcttgcatacgcctttattttgacaagagaatccggttatcctcaggtgttctatggggatatgtacgggacaaaagggacatcgccaaaggaaattccctcactgaaagataatatagagccgattttaaaagcgcgtaaggagtacgcatacgggccccagcacgattatattgaccacccggatgtgatcggatggacgagggaaggtgacagctccgccgccaaatcaggtttggccgctttaatcacggacggacccggcggatcaaagcggatgtatgccggcctgaaaaatgccggcgagacatggtatgacataacgggcaaccgttcagatactgtaaaaatcggatctgacggctggggagagtttcatgtaaacgatgggtccgtctccatttatgttcagaaataaggtaataaaaaaacacctccaagctgagtgcgggtatcagcttggaggtgcgtttattttttcagccgtatgacaaggtcggcatcaggtgtgacaaatacggtatgctggctgtcataggtgacaaatccgggttttgcgccgtttggctttttcacatgtctgatttttgtataatcaacaggcacggagccggaatctttcgccttggaaaaataagcggcgatcgtagctgcttccaatatggattgttcatcgggatcgctgcttttaatcacaacgtgggatcc

SEQ ID NO: 66 - DNA, 1920 bp, Aspergillus niger
  source 1..1920: mol_type = unassigned DNA
atgtcttttcgttctttattagctttatctggtttagtttgtactggtttagctaatgttatttctaaacgtgctactttagattcttggttatctaatgaagctactgttgctcgtactgctattttaaataatattggtgctgatggtgcttgggtttctggtgctgattctggtattgttgttgcttctccttctactgataatcctgattatttttatacttggactcgtgattctggtttagttttaaaaactttagttgatttatttcgtaatggtgatacttctttattatctactattgaaaattatatttctgctcaagctattgttcaaggtatttctaatccttctggtgatttatcttctggtgctggtttaggtgaacctaaatttaatgttgatgaaactgcttatactggttcttggggtcgtcctcaacgtgatggtcctgctttacgtgctactgctatgattggttttggtcaatggttattagataatggttatacttctactgctactgatattgtttggcctttagttcgtaatgatttatcttatgttgctcaatattggaatcaaactggttatgatttatgggaagaagttaatggttcttctttttttactattgctgttcaacatcgtgctttagttgaaggttctgcttttgctactgctgttggttcttcttgttcttggtgtgattctcaagctcctgaaattttatgttatttacaatctttttggactggttcttttattttagctaattttgattcttctcgttctggtaaagatgctaatactttattaggttctattcatacttttgatcctgaagctgcttgtgatgattctacttttcaaccttgttctcctcgtgctttagctaatcataaagaagttgttgattcttttcgttctatttatactttaaatgatggtttatctgattctgaagctgttgctgttggtcgttatcctgaagatacttattataatggtaatccttggtttttatgtactttagctgctgctgaacaattatatgatgctttatatcaatgggataaacaaggttctttagaagttactgatgtttctttagatttttttaaagctttatattctgatgctgctactggtacttattcttcttcttcttctacttattcttctattgttgatgctgttaaaacttttgctgatggttttgtttctattgttgaaactcatgctgcttctaatggttctatgtctgaacaatatgataaatctgatggtgaacaattatctgctcgtgatttaacttggtcttatgctgctttattaactgctaataatcgtcgtaattctgttgttcctgcttcttggggtgaaacttctgcttcttctgttcctggtacttgtgctgctacttctgctattggtacttattcttctgttactgttacttcttggccttctattgttgctactggtggtactactactactgctactcctactggttctggttctgttacttctacttctaaaactactgctactgcttctaaaacttctacttctacttcttctacttcttgtactactcctactgctgttgctgttacttttgatttaactgctactactacttatggtgaaaatatttatttagttggttctatttctcaattaggtgattgggaaacttctgatggtattgctttatctgctgataaatatacttcttctgatcctttatggtatgttactgttactttacctgctggtgaatcttttgaatataaatttattcgtattgaatctgatgattctgttgaatgggaatctgatcctaatcgtgaatatactgttcctcaagcttgtggtacttctactgctactgttactgatacttggcgt

SEQ ID NO: 67 - DNA, 1845 bp, Aspergillus niger
  source 1..1845: mol_type = genomic DNA
actttagattcttggttatctaatgaagctactgttgctcgtactgctattttaaataatattggtgctgatggtgcttgggtttctggtgctgattctggtattgttgttgcttctccttctactgataatcctgattatttttatacttggactcgtgattctggtttagttttaaaaactttagttgatttatttcgtaatggtgatacttctttattatctactattgaaaattatatttctgctcaagctattgttcaaggtatttctaatccttctggtgatttatcttctggtgctggtttaggtgaacctaaatttaatgttgatgaaactgcttatactggttcttggggtcgtcctcaacgtgatggtcctgctttacgtgctactgctatgattggttttggtcaatggttattagataatggttatacttctactgctactgatattgtttggcctttagttcgtaatgatttatcttatgttgctcaatattggaatcaaactggttatgatttatgggaagaagttaatggttcttctttttttactattgctgttcaacatcgtgctttagttgaaggttctgcttttgctactgctgttggttcttcttgttcttggtgtgattctcaagctcctgaaattttatgttatttacaatctttttggactggttcttttattttagctaattttgattcttctcgttctggtaaagatgctaatactttattaggttctattcatacttttgatcctgaagctgcttgtgatgattctacttttcaaccttgttctcctcgtgctttagctaatcataaagaagttgttgattcttttcgttctatttatactttaaatgatggtttatctgattctgaagctgttgctgttggtcgttatcctgaagatacttattataatggtaatccttggtttttatgtactttagctgctgctgaacaattatatgatgctttatatcaatgggataaacaaggttctttagaagttactgatgtttctttagatttttttaaagctttatattctgatgctgctactggtacttattcttcttcttcttctacttattcttctattgttgatgctgttaaaacttttgctgatggttttgtttctattgttgaaactcatgctgcttctaatggttctatgtctgaacaatatgataaatctgatggtgaacaattatctgctcgtgatttaacttggtcttatgctgctttattaactgctaataatcgtcgtaattctgttgttcctgcttcttggggtgaaacttctgcttcttctgttcctggtacttgtgctgctacttctgctattggtacttattcttctgttactgttacttcttggccttctattgttgctactggtggtactactactactgctactcctactggttctggttctgttacttctacttctaaaactactgctactgcttctaaaacttctacttctacttcttctacttcttgtactactcctactgctgttgctgttacttttgatttaactgctactactacttatggtgaaaatatttatttagttggttctatttctcaattaggtgattgggaaacttctgatggtattgctttatctgctgataaatatacttcttctgatcctttatggtatgttactgttactttacctgctggtgaatcttttgaatataaatttattcgtattgaatctgatgattctgttgaatgggaatctgatcctaatcgtgaatatactgttcctcaagcttgtggtacttctactgctactgttactgatacttggcgt

SEQ ID NO: 68 - DNA, 1311 bp, Humicola insolens
  source 1..1311: mol_type = genomic DNA
atggctcgcggtaccgctctcctcggcctgaccgcgctcctcctggggctggtcaacggccagaagcctggtgagaccaaggaggttcacccccagctcacgaccttccgctgcacgaagaggggtggttgcaagccggcgaccaacttcatcgtgcttgactcgctgtcgcaccccatccaccgcgctgagggcctgggccctggcggctgcggcgactggggcaacccgccgcccaaggacgtctgcccggacgtcgagtcgtgcgccaagaactgcatcatggagggcatccccgactacagccagtacggcgtcaccaccaacggcaccagcctccgcctgcagcacatcctccccgacggccgcgtcccgtcgccgcgtgtctacctgctcgacaagacgaagcgccgctatgagatgctccacctgaccggcttcgagttcaccttcgacgtcgacgccaccaagctgccctgcggcatgaacagcgctctgtacctgtccgagatgcacccgaccggtgccaagagcaagtacaaccccggcggtgcctactacggcactggctactgcgatgctcagtgcttcgtgacgcccttcatcaacggcttgggcaacatcgagggcaagggctcgtgctgcaacgagatggatatctgggaggccaactcgcgcgcctcgcacgtggctccccacacctgcaacaagaagggcctgtacctttgcgagggtgaggagtgcgccttcgagggtgtttgcgacaagaacggctgcggctggaacaactaccgcgtcaacgtgactgactactacggccggggcgaggagttcaaggtcaacaccctcaagcccttcaccgtcgtcactcagttcttggccaaccgcaggggcaagctcgagaagatccaccgcttctacgtgcaggacggcaaggtcatcgagtccttctacaccaacaaggagggagtcccttacaccaacatgatcgatgacgagttctgcgaggccaccggctcccgcaagtacatggagctcggcgccacccagggcatgggcgaggccctcacccgcggcatggtcctggccatgagcatctggtgggaccagggcggcaacatggagtggctcgaccacggcgaggccggcccctgcgccaagggcgagggcgccccgtccaacattgtccaggttgagcccttccccgaggtcacctacaccaacctccgctggggcgagatcggctcgacctaccaggaggttcagaagcctaagcccaagcccgggcacggcccccgatcggactaatag

SEQ ID NO: 69 - DNA, 609 bp, Bacillus amyloliquefaciens
  source 1..609: mol_type = unassigned DNA
tttaattcttataattctggtttatggcaaaaagctgatggttattctaatggtgatatgtttaattgtacttggcgtgctaataatgtttctatgacttcttctggtgaaatgcgtttagctttaacttctccttcttataataaatttgattgtggtgaaaatcgttctgttcaaacttatggttatggtttatatgaagttcgtatgaaacctgctaaaaatactggtattgtttcttctttttttacttatactggtcctactgaaggtactccttgggatgaaattgatattgaatttttaggtaaagatactactaaagttcaatttaattattatactaatggtgctggtaatcatgaaaaattagctgatttaggttttgatgctgctaatgcttatcatacttatgcttttgattggcaacctaattctattaaatggtatgttgatggtcaattaaaacatactgctactactcaaattcctgctgctcctggtaaaattatgatgaatttatggaatggtactggtgttgatgattggttaggttcttataatggtgttaatcctttatatgctcattatgattgggttcgttatact

SEQ ID NO: 70 - DNA, 1338 bp, Aspergillus niger
  source 1..1338: mol_type = genomic DNA
gaacccccacaatcacgcaaaaatggtcggactgctttcaatcaccgcggcgcttgccgcgactgtgttgccaaacattgtctctgccgttggtctggatcaggctgcagttgccaaaggacttcaatactttggcacagctacggataatcccgagctcacggatattccatacgttactcagctgaacaacaccgcggactttggtcaaattacccctggaaactcgatgaagtgggatgccacagaaccatctcagggcaccttcacgttcacgaaaggcgatgtcattgcagatctggctgagggtaatggccaatatctccgatgtcatactctggtttggtataatcagctacctagctgggtgactagcggaacttggactaatgctactctcaccgccgcattgaagaaccacatcacgaatgtggtgtcgcactacaaagggaaatgtcttcattgggacgtggtcaatgaggcgttgaatgacgacggaacctaccgcaccaacatcttctacaccaccatcggcgaagcctacatccccattgcctttgccgcagcggctgcagccgacccggacgcgaagctgttctacaatgactacaacctcgaatacggcggcgccaaagccgccagcgcccgcgccattgtccagctggtcaagaatgcaggtgccaagatcgacggggtagggttgcaggcccatttcagcgtcggcaccgtgccgagtacgagctcgctcgtctcggtgctgcaatctttcactgcgctcggggtcgaggtcgcctacacggaggccgacgtgcgcattctcctgcccaccaccgccactaccctggcccaacagtcgagcgatttccaggccctggtgcaatcctgtgtgcagacaacgggctgcgtcggcttcactatctgggattggacagataagtacagctgggttcccagcacgttctcgggctatggggcggcgctaccctgggatgagaacctggttaagaagcccgcgtacaatggcttgttggccggcatgggggttacagttaccactacgactaccaccaccactgctactgccactggtaagactacgactaccacaacgggtgccacgagcacggggactacggctgcgcattgggggcagtgtggagggctcaactggagtggaccgacggcgtgtgccactgggtacacctgcacttatgtcaatgactattactcgcagtgtctgtgaagtatagcccaacctaaacctgccggcgtgcttgccattcagtcagtgagatttatatatcacaatactcaaaattcattgctcgacctctgaaa

SEQ ID NO: 71 - DNA, 8623 bp, Dictyoglomus thermophilum
  source 1..8623: mol_type = genomic DNA
ggtaccagatctaatatctttgaattgtaacgcccctcaaaagtaagaactacaaaaaaagaatacgttatatagaaatatgtttgaaccttcttcagattacaaatatattcggacggactctacctcaaatgcttatctaactatagaatgacatacaagcacaaccttgaaaatttgaaaatataactaccaatgaacttgttcatgtgaattatcgctgtatttaattttctcaattcaatatataatatgccaatacattgttacaagtagaaattaagacacccttgatagccttactatacctaacatgatgtagtattaaatgaatatgtaaatatatttatgataagaagcgacttatttataatcattacatatttttctattggaatgattaagattccaatagaatagtgtataaattatttatcttgaaaggagggatgcctaaaaacgaagaacattaaaaacatatatttgcaccgtctaatggatagaaaggaggtgatccagccgcaccttatgaaaaatcattttatcagtttgaaaattatgtattatggagctctataaaaatgaggagggaaccgaatgcagacatcaatcacacttacatctaacgcatcaggcacattcgacggctattactacgagctttggaaggacacaggcaacacgactatgactgtatacactcaaggtcgcttctcatgccagtggtctaacatcaacaacgcgcttttccgcacgggcaagaagtacaaccagaactggcaatctcttggcactatccgcatcacttattctgcgacatacaacccgaacggcaactcttacctttgtatctacggctggtctacgaacccgcttgttgagttctacatcgtagagtcttggggcaactggcgtcctcctggcgcaacatctcttggccaggttacaatcgatggtggcacatatgacatctaccgcactactcgcgttaaccagcctagcatcgttggcacagctactttcgaccaatactggagcgttcgcactagcaagcgcacatctggcacagttacggttacggaccactttcgcgcatgggcaaatcgtggccttaaccttggcacaatcgaccaaatcacactttgtgttgagggctaccagtcttctggcagcgcaaacatcactcaaaacactttctctcagggcagctaacgcgtagggcccgcggctagcggccgcgtcgactagaagagcagagaggacggatttcctgaaggaaatccgtttttttattttgcccgtcttataaatttcgttgtccaactcgcttaattgcgagtttttatttcgtttatttcaattaaggtaactaaagatcctctagagtcgattatgtcttttgcgcagtcggcttaaaccagttttcgctggtgcgaaaaaagagtgtcttgtgacacctaaattcaaaatctatcggtcagatttataccgatttgattttatatattcttgaataacatacgccgagttatcacataaaagcgggaaccaatcatcaaatttaaacttcattgcataatccattaaactcttaaattctacgattccttgttcatcaataaactcaatcatttctttaattaatttatatctatctgttgttgttttctttaataattcatcaacatctacaccgccataaactatcatatcttctttttgatatttaaatttattaggatcgtccatgtgaagcatatatctcacaagacctttcacacttcctgcaatctgcggaatagtcgcattcaattcttctgtaattatttttatctgttcataagatttattaccctcatacatcactagaatatgataatgctcttttttcatcctaccttctgtatcagtatccctatcatgtaatggagacactacaaattgaatgtgtaactcttttaaatactctaaccactcggcttttgctgattctggatataaaacaaatgtccaattacgtcctcttgaatttttcttgttttcagtttcttttattacattttcgctcatgatataataacggtgctaatacacttaacaaaatttagtcatagataggcagcatgccagtgctgtctatctttttttgtttaaaatgcaccgtattcctcctttgcatatttttttattagaataccggttgcatctgatttgctaatattatatttttctttgattctatttaatatctcattttcttctgttgtaagtcttaaagtaacagcaacttttttctcttcttttctatctacaaccatcactgtacctcccaacatctgtttttttcactttaacataaaaaacaaccttttaacattaaaaacccaatatttatttatttgtttggacaatggacaatggacacctaggggggaggtcgtagtacccccctatgttttctcccctaaataaccccaaaaatctaagaaaaaaagacctcaaaaaggtctttaattaacatctcaaatttcgcatttattccaatttcctttttgcgtgtgatgcgctgcgtccattaaaaatcctagagctttgaaaccgaaagttaatagctgtcgctactactttcgcttacgctctaagtatattttaaggactgtcacacgcaaaaagttttctcggcataaaagtacctctacatctctaaatcgtctgtacgctgtttctcacgctttctatcgaccttctggacattatcctgtacaacatccataaactgtcccacacgctcaaatttggaatcattaaagaatttctctttaagcctattaaaccctttctcaaacccagggaaattcgccctcgcagcacgatataaagtcactgtactagcttgaaatttctctgatacattcaactgctcattcaaactatcattctctcgctttaatttattaacctctttacttttttcgtgatacccctctttccatgtattcactacttctttcaaactctctctacgtttttttaattcttgattttctgtgtaatagtctgtgctcttaatattttcgtaatcatcaacaatccgttctgcagaagagattgtttcttgcaggcgttcaaattcatcagcagttaatatctttctaccagtctcttcacgtccagagaacaaacctgtacgctcattttcataatcaaagggtttcgtagacctcatatgctctattccactctgtaactgcttatttgccttctgtaactcatccttaacttcttgcagttcctgtttatgaaatacagtatctttcttgtactgatccatcgctttatgttctcgttctgtaacctctttggacgtgcctctttcaagttcataacctttctcattcacatactcattaaatctatcttgtaattgagtaaagtctttcttgttgcctaactgttcttttgcagacaatctcccgtcctctgttaaagggacaaaaccaaagtgcatatgtgggactctttcatccagatggacagtcgcatacagcatattttccttaccgtattcattttctagaaactccaagctatctttaaaaaatcgttctatttcttctccgcttaaatcatcaaagaaatctttatcacttgtaaccagtccgtccacatgtcgaattgcatctgaccgaattttacgtttccctgaataattctcatcaatcgtttcatcaattttatctttatactttatattttgtgcgttaatcaaatcataatttttatatgtttcctcatgatttatgtctttattattatagtttttattctctctttgattatgtctttgtatcccgtttgtattacttgatcctttaactctggcaaccctcaaaattgaatgagacatgctacacctccggataataaatatatataaacgtatatagatttcataaagtctaacacactagacttatttacttcgtaattaagtcgttaaaccgtgtgctctacgaccaaaactataaaacctttaagaactttctttttttacaagaaaaaagaaattagataaatctctcatatcttttattcaataatcgcatccgattgcagtataaatttaacgatcactcatcatgttcatatttatcagagctcgtgctataattatactaattttataaggaggaaaaaatatgggcatttttagtatttttgtaatcagcacagttcattatcaaccaaacaaaaaataagtggttataatgaatcgttaataagcaaaattcatataaccaaattaaagagggttataatgaacgagaaaaatataaaacacagtcaaaactttattacttcaaaacataatatagataaaataatgacaaatataagattaaatgaacatgataatatctttgaaatcggctcaggaaaaggccattttacccttgaattagtaaagaggtgtaatttcgtaactgccattgaaatagaccataaattatgcaaaactacagaaaataaacttgttgatcacgataatttccaagttttaaacaaggatatattgcagtttaaatttcctaaaaaccaatcctataaaatatatggtaatataccttataacataagtacggatataatacgcaaaattgtttttgatagtatagctaatgagatttatttaatcgtggaatacgggtttgctaaaagattattaaatacaaaacgctcattggcattacttttaatggcagaagttgatatttctatattaagtatggttccaagagaatattttcatcctaaacctaaagtgaatagctcacttatcagattaagtagaaaaaaatcaagaatatcacacaaagataaacaaaagtataattatttcgttatgaaatgggttaacaaagaatacaagaaaatatttacaaaaaatcaatttaacaattccttaaaacatgcaggaattgacgatttaaacaatattagctttgaacaattcttatctcttttcaatagctataaattatttaataagtaagttaagggatgcataaactgcatcccttaacttgtttttcgtgtgcctattttttgtgaatcgacctgcaggcatgcaagcttaagcgagttggaatttaaatatgatatctacattatcagcagtaacatcaacctttgatacaaggttgttgacgattttctttttattatcatatgatagttcattaatcggaattgagcccaactgagttttaactaactcaaaaacatcagtagagtcattaaatttattttcgctaatcttagctttaagcagctttttctcagcctgaagggaatcagtacgatctttcaactcatccatagtgataaaatcatttaggtacaaatcagagttcttttgtatttttttatcgatctgtgaaatttgctttttaaatgacgaagtatcaagaataggttggttgttgccattgataattttcaataaggagtcattattttcttgaaatccaatcaggttgtcaataacagtattttctaaattacttaaatcataagttcctgaatcacactttttattgtcattatatactgtaattccttttgtttttcgaggaaatctatttgcacagtgatatttcatagtgcggcttccatcttttcttttgtggccaagaacaatttttaaaggtgctccacagtaaccgcaccttgccatccctgacagcatatatttagcttggaaaggtctagggttgttatttctttcataagtctgctgttgtctttcttctagctctttttgaacttttaaataagtctcataagggataattggtttgtgcataccttcaaataggctgtccttaaatttgatataaccacagtaaactggattatcaagtgtttgtcttagggtacgataagaccacggtatatctttaccgatgtgtccagattcattgagtttatctcttaattttgtaagtgatattcctgataaataatcagtgaatatttgttcaactattgtagcttgtaaaggaacaatttctaatatacctgtctttctgttgtggtaatacccaaaagctgtcttagtccacatcatagacttaccagatttcgctcgccctagtttacccatagtcatgcgttcttttatattctctctttcaaactcattaattgcagaaagaatagtgagaaacaagctacccatagcagaagaagtatcaatactttcattaagcgagataaagtctattttattttttgtgaacacatccttaacaagataaagagtatctcttacactacgtgaaaggcggtctagcttatatacaagaactgtatcaaaagctttattctcgatatcgttgattaatctttgcattgctgggcgttcaagtttggcccctgaaaaaccagcatcagtataagtatcagatacttgccaccccattgcttcagcatattttgttaaacggtcaatttgctcatcaattgagaacccttcctctgcttggttagtagtggatactcgtgtatagattgctactttcttagtcatgagatttcccccttaaaaataaattcattcaaatacagatgcattttatttcatatagtaagtacatcacctattagtttgttgtttaaacaaactaacttattttcatcttatatagcctcgtcagtattttcaatattttttttagttttttatgaacacattagatataataaagggaagattcgctatgtactatgttgatacttaatttaaagattaaacaaatggagtggatgaagtggatatcgctgatcaaacctttgtcaaaaaagtaaatcaaaagttattattaaaagaaatccttaaaaattcacctatttcaagagcaaaattatctgaaatgactggattaaataaatcaactgtctcatcacaggtaaacacgttaatgaaagaaagtatggtatttgaaataggtcaaggacaatcaagtggcggaagaagacctgtcatgcttgtttttaataaaaaggcaggatactccgttggaatagatgttggtgtggattatattaatggcattttaacagaccttgaaggaacaatcgttcttgatcaataccgccatttggaatccaattctccagaaataacgaaagacattttgattgatatgattcatcactttattacgcaaatgccccaatctccgtacgggcttattggtataggtatttgcgtgcctggactcattgataaagatcaaaaaattgttttcactccgaactccaactggagagatattgacttaaaatcttcgatacaagagaagtacaatgtgcctgtttttattgaaaatgaggcaaatgctggcgcatatggagaaaaagtatttggagctgcaaaaaatcacgataacattatttacgtaagtatcagcacaggaatagggatcggtgttattatcaacaatcatttatatagaggagtaagcggcttctctggagaaatgggacatatgacaatagactttaatggtcctaaatgcagttgcggaaaccgaggatgctgggaattgtatgcttcagagaaggctttattaaaatctcttcagaccaaagagaaaaaactgtcctatcaagatatcataaacctcgcccatctgaatgatatcggaaccttaaatgcattacaaaattttggattctatttaggaataggccttaccaatattctaaatactttcaacccacaagccgtaattttaagaaatagcataattgaatcgcatcctatggttttaaattcaatgagaagtgaagtatcatcaagggtttattcccaattaggcaatagctatgaattattgccatcttccttaggacagaatgcaccggcattaggaatgtcctccattgtgattgatcattttctggacatgattacaatgtaattttttatggaatggacagctcatctttaaagatgagtttttttattctaggagtatttctgaattcgagctcgttattaatctgttcagcaatcgggcgcgattgctgaataaaagatacgagagacctctcttgtatcttttttattttgagtggttttgtccgttacactagaaaaccgaaagacaataaaaattttattcttgctgagtctggctttcggtaagctagacaaaacggacaaaataaaaattggcaagggtttaaaggtggagattttttgagtgatcttctcaaaaaatactacctgtcccttgctgatttttaaacgagcacgagagcaaaacccccctttgctgaggtggcagagggcaggtttttttgtttcttttttctcgtaaaaaaaagaaaggtcttaaaggttttatggttttggtcggcactgccgacagcctcgcagagcacacactttatgaatataaagtatagtgtgttatactttacttggaagtggttgccggaaagagcgaaaatgcctcacatttgtgccacctaaaaaggagcgatttacatatgagttatgcagtttgtagaatgcaaaaagtgaaatcagctggactaaaaggcagagctc

SEQ ID NO: 72 - DNA, 960 bp, Thermomyces lanuginosus
  source 1..960: mol_type = genomic DNA
tcggcccgacgtcttgcaatccttgcagtgatggtcggctttacccccgttgcccttgcggccttagccgcgactggggccctggccttcccggcagggaatgccacggagctcgaaaagcgacagacaacccccaactcggagggctggcacgatggttattactattcctggtggagtgacggtggagcgcaggccacgtacaccaacctggaaggcggcacctacgagatcagctggggagatggcggtaacctcgtcggtggaaagggctggaaccccggcctgaacgcaagagccatccactttgagggtgtttaccagccaaacggcaacagctaccttgcggtctacggttggacccgcaacccgctggtcgagtattacatcgtcgagaactttggcacctatgatccttcctccggtgctaccgatctaggaactgtcgagtgcgacggtagcatctatcgactcggcaagaccactcgcgtcaacgcacctagcatcgacggcacccaaaccttcgaccaatactggtcggtccgccaggacaagcgcaccagcggtaccgtccagacgggctgccacttcgacgcctgggctcgcgctggtttgaatgtcaacggtgaccactactaccagatcgttgcaacggagggctacttcagcagcggctatgctcgcatcaccgttgctgacgtgggctaagacgtaacctggtggtgatctcgcgaggcaacagccaagaatgtcgtcagatgtgccggttgaaggtattcaatcagcatatctgtctgcccttgcgagtgatactttggaggactgtggagaactttgtgcgagcctggccaggatcagtagttgctttgcggtgttttgctccctattctcgtgaaaaaattgttattgcttcgttgtctagtgtacatagccgagcaattgaggcctcacgcttgggaa

SEQ ID NO: 73 - DNA, 618 bp, Bacillus agaradhaerens
  source 1..618: mol_type = unassigned DNA
caaattgttactgataattctattggtaatcatgatggttatgattatgaattttggaaagattctggtggttctggtactatgattttaaatcatggtggtactttttctgctcaatggaataatgttaataatattttatttcgtaaaggtaaaaaatttaatgaaactcaaactcatcaacaagttggtaatatgtctattaattatggtgctaattttcaacctaatggtaatgcttatttatgtgtttatggttggactgttgatcctttagttgaatattatattgttgattcttggggtaattggcgtcctcctggtgctactcctaaaggtactattactgttgatggtggtacttatgatatttatgaaactttacgtgttaatcaaccttctattaaaggtattgctacttttaaacaatattggtctgttcgtcgttctaaacgtacttctggtactatttctgtttctaatcattttcgtgcttgggaaaatttaggtatgaatatgggtaaaatgtatgaagttgctttaactgttgaaggttatcaatcttctggttctgctaatgtttattctaatactttacgtattaatggtaatccttta

SEQ ID NO: 74 - DNA, 1728 bp, unidentified
  source 1..1728: mol_type = genomic DNA
attcgtcaacgtgctggtaatcatactgtttgtaattctcaattatgtacttggtggcatgataatggtgaaattaatactgcttctatggttcaattaggtaatgttcgtcaatctcataaatatttagttcaagtttctattgctggtgttaatgatttttatgattcttttgcttatgaatctattcctcgtaatggtcgtggtcgtatttattctccttgggatcctcctaattctgatactttaggttctgatgttgatgatggtattactattgaaacttctgctggtattaatatggcttggtctcaatttgaatattctactggtgttgatgttaaaattttaactcgtgatggttctcgtttacctgatccttctggtgttaaaattcgtcctactgctatttcttatgatattcgttcttcttctgatggtggtattgttattcgtgttcctcatgatcctaatggtcgtcgtttttctgttgaatttgataatgatttatatacttatcgttctgatggttctcgttatgtttcttctggtggttctattgttggtgttgaacctcgtaatgctttagttatttttgcttctccttttttacctgataatatggttcctcgtattgatggtcctgatactaaagttatgactcctggtcctattaatcaaggtgattggggttcttctggtattttatattttcctcctggtgtttattggatgaattctaatcaacaaggtcaaactcctaaaattggtgaaaatcatattcgtttacatcctaatacttattgggcttatttagctcctggtgcttatgttaaaggtgctattgaatattctactaaatctgatttttatgctactggtcatggtgttttatctggtgaacattatgtttatcaagctaatcctgctacttattatcaagctttaaaatctgatgctacttctttacgtatgtggtggcataataatttaggtggtggtcaaacttggtattgtcaaggtcctactattaatgctcctccttttaatactatggattttcatggttcttctgatattactactcgtatttctgattataaacaagttggtgcttttttttttcaaactgatggtcctcaaatgtatcctaattctcaagttcatgatgttttttatcatgttaatgatgatgctattaaaacttattattctggtgttactgttactcgtgctactatttggaaagctcataatgatcctattattcaaatgggttgggatactcgtgatgttactggtgttactttacaagatttatatattattcatactcgttatattaaatctgaaacttatgttccttctgctattattggtgcttctcctttttatatgcctggtcgttctgttgatcctgctaaatctatttctatgactatttctaatttagtttgtgaaggtttatgtcctgctttaatgcgtattactcctttacaaaattatcgtgattttcgtattcaaaatgttgcttttcctgatggtttacaagctaattctattggtactggtaaatctattgttcctgcttcttctggtttaaaatttggtgttgctatttctaattggactgttggtggtgaacaagttactatgtctaattttcaatctgattctttaggtcaattagatattgatgtttcttattggggtcaatgggttattcgt

SEQ ID NO: 75 - DNA, 1035 bp, Sodiomyces alcalophilus
  source 1..1035: mol_type = genomic DNA
gtgagacccggacgttcgaatttagaagaaacgacaaggcagtcatcgagacgacttctacccaaggcagaaagagaaagtccacgcactgaaaccaagcatgaagcttcttccctccttgattggcctggccagtctggcgtccctcgccgtcgcccggatccccggctttgacatttcgggctggcaaccgaccaccgactttgcaagggcgtatgctaatggagatcgtttcgtctacatcaaggtacgttcaaccttgccaccaagttgcgaacccgagacaagactgtgaccgcctcctttgccctggggcagctcacgcacccagcagcatcccatcccccggccccccacgtaccaccggaaagctaacatcaaccccctaccactgctaccaggccaccgagggcaccacattcaagagctccgcattcagccgccagtacaccggcgcaacgcaaaacggcttcatccgcggcgcctaccacttcgcccagcccgccgcgtcctcgggcgccgcgcaggcgagatacttcgccagcaacggcggcggctggtccaaggacggcatcaccctgcccggggcgctggacatcgagtacaaccccaacggcgccacctgctacggcctctcgcaatcggccatggtgaactggatcgaggactttgtcaccacctaccacggcatcacctcccgctggcccgtcatctacaccaccaccgactggtggacccagtgcaccggcaactccaaccgcttcgcgaaccgctgcccgctgtggatcgcccgctacgccagctccgtcggcactctgcccaatggctggggcttttacaccttctggcagtacaacgacaagtatcctcagggcggtgattcgaactggttcaacggcgatgcgtcgcgtctcagggctctcgctaacggagactaaacgcactcgcaatgactgggctggacttttctggacttacaagtaaggggacttcagggagaaccgcctcaagacactgtccagattccacacacgc

SEQ ID NO: 76 - DNA, 3324 bp, Trichoderma atroviride
  source 1..3324: mol_type = genomic DNA
gaaccaatgaatctgaaccgtctttgatgaacaggaccacttgggaaaaaggccacagtaagacggcagtgccccccgttccatcacggacgtggctattttccaccattgtgagcatagctggtctcgggcgagccttgcctagttgttagagatcagcggagaggtcctgaaatgatctgcgtcgacgtgcttttcgacgggctggtataggcaggacacaatggacagcccgcaagaaccatgaggccccggaccgatgatgggcatggagacccggtcagaggagtaatcgcagcagcgagacaagcgagattctttatatagctttcgatgacttccggggcacgtcgctcacggttttgatcacgcggtaacttgtgggtgagccagccaccaggatactgcttctcttattacgagcctcgtctcgttgttcattccttttgctctgccttctggttctagcactctcgctttagtctctcctttgatacgccatgaagtctctcaccgctgtggtggccttgctaggcgccgtggcagcctcgccagcagtcgtccgccatcatggccgctctgctctccagcctcgagcaaacagctccttttggtatgctgccatggaccacaccggccagttcaagggctctgctccttatgtagatgcttcctacaacgtctttgttgccgtcagccctggtgacgccggctctcttcagaatgccatcgactcagctggtagcggcaaccgacagaatgagtggctggcatcgcagcctcgtgtcgtgtacatcccgtcgggaacatacgagctctcaagcaccctcaacatgcgtaccgacactatcctgttcggtgacgccaccaaccctcccgttatcaaggccgcggcaggattcagcgacaattacctcgtcaacggccaggatccctctacgggcgatgccggtgaactttcctttgctgttggactgaagaatgttgttctggacaccactgctgttgatggaagctccagcatctctgctctctactggggtgttgctcaggcttgtcagctacaaaacgtcaagatcacgcttgcgccctcggtcaacggcaagggccacactggtgtccagctgggccgtggatctactcttgcactcgccgacatccgcattgagaatggccagacgggtatctggcacaacggccaccagcaggccctctacaagagcatctacttttacaagaacactgtcggcatgctcatcagcggcggcaacaccatcagcttgttgaaccctacctttgacagcgttggcactggtgtttccaacaccggcggcagcccctttatcggaatcgtcgatgccacgtccatcaactcgggcgtcaccttcacaaccagcgtctatccttccattgtcattgacaacttgaccaaggacaccgactctgacgttgccgtgatccgcggcacaacgactgtcggcgcctcaaagaacgtcgtcaactacagctacggaaacacggttggagcgaaccccgtctacggcggtgtcaacggcaacacgactcgccccagcggcgttgcccccggtggccgtatcccagccgtcgccgtgcccaactatgcaaacaatcctgttaccgactttgtcaacgtcaaggaccccagccagaacggcggccagaccgtcaagggcgatggcagcaccgacgactctgccgccctcaacaaagtcctccaattcgccgccaccaacaacaagattgcctacttcccctttggcgactaccgtgttgagtctacgctcctggtccccgttggctcccagctggttggcgaggcctgggcaactatttccggcggcggcgacttcttcaaggacgcatccagccccaagcccgtagtccaggtcggcaacgagggcgacgtcggcgtggcccagatccaggacttccgcttcaccgtctccgacgtcctgcccggcgccatcatcgtgcagttcaacgctgccggctccaagcccggcgacgtggcgctcttcaactccctcgtcaccgtcggcggaacccacggggccgatgcgctgaccaacgcctgcaccgacgccagcaacgagtgccaggctgcctttctcggccttcacttcaccgagggctcgtccgcctacgtggagaacacctggaactgggttgccgaccacatcaccgagggcttcagcggcggatccaacattgccgcaaagggcggcgcgctggtcgagtccaccaagggcacctggctcaacggcctgggcagcgagcactggtggctgtaccagctcaacctcaaggctgccagcaacgtcgccgtgacgctgctgcagagcgagaccaactacgaccagggcgacaacaccaagcaggtcccccctgcgccgtggaccgccgatgtccagggctggggcgatcccgacttctcctggtgcgacagcactgcccgctgccacatgggcctcgccaactatgtcaacggcggctctgacatttactactacggctctgcctcgtgggcctttttcagcggtcccggataccagggctgcgctggttcctatcagtgccaaggtacgttgatgacgaaaacagtttccaagctacaattcactgacattaagcagactacatgcacttcatctcggcgactcctacgaacctccagatgtacggaatgtgctccaaggacacctccgttgctctccgcctgggcgacggcaccaagatcaatgcccagcctgactttaccggaggttggagccctggcgcagacattggtcgctatacctcttagatgtttggagtgagagcatttgcttctgaatagtaaatgtaatgtgcatatatattgcgtggtctttgcatataatttgtgattctttgtctatatagaacgtttccctgattgaagagaatagatgtctttttagatttgtaattctgttaaaactaaaaagaaatttgaggatttcaggtgcaagttctgtcgcttattgtatcttgtcaagttttggtacaagtcagatcgtagatgcaaacgtataatgcgcatttgttcggaaaacaacaaaggcgaaatctttcattatgatacaacgtctcttccggtaccacatccttattagctgttgaatttggctaagctactctttttgaaggctggttgagattctcccattcatgctgttgccaatcccgaagagacacgaatgacgtagacagattggagatgtatacaaactgcaagtacactgaaataatcgctgtagatatgaatgaatcaatgactaaatc

SEQ ID NO: 77 - DNA, 1353 bp, Trichoderma harzianum
  source 1..1353: mol_type = genomic DNA
atgaagcttcttccctccttgattggcctggccagtctggcgtccctcgccgtcgccgccccttctctcattccaagagtatcacccttttccattgccaagcctggaggtgttgacgacatcgttatcacggcaaacaacactctcaacggaacctatcatagttcaacaacagtctccaaaaatgtcatccagactcgagctcaggctggacacctgcccatccaactcgtcaacaacttctccggtagtcaggtcaatgcatacatttccggcctggacactgacaacagggtcgtttttgtcaggggtgacggcagtcttgtgtatcccagctctggaggctccagtgtccctgttgcgatcagcacccccatcaacattgcgttgcctgctcaaggccagtccatcacggtgaatgtgcctattgtcatcagctctgcgcgtatctacttttcagtgggcgatctccagttcttcatggtcaagattcccaacggcgatggcttggtgcaaccgtcccagttcaaccttcaagacccgagtgcaggcctcctctggggctttgttgagctcacctatactacggacctggctgtctacgcaaacatcagctacgtcgactttgtcggtatgattctcagtatgagcttgagtgccacggatggaagcgccactcagaccacgaaaggccttggatcttccgcactcacccagatttgccagggcttggtccaacaagctagcgtcgacggcttcccctggtcttcgatgtgtatcgccaattctgctggaactctcgttcgtgcgctgtctccaggcgactacagtgtgatcaatgcagcggccttccagaactactggagtgcctatgtcgaccaagtctggagccagtatactaacactcctctcaccatcaacacacaaacctctgctggcagcgtcaactgccaggtctccggcgacacgctgaactgcaacggcgacaaccgcggctacgctaagccggctgcaggagacatctggggctgcaacagtggaccatttgccattcagagcggtgacaatgccgtccattcggctgttgttccccgtctgtgtgctgcctttgtgcgatctaccttgttgcttgctggtggcaacgttcagccaggcctgggccagtcttcatactacacagtcagccctaccaaccactacagccgtcttgttcaccaatttgaaattgatggtcgaggctacgctttcccatatgatgatgtcaacccagatggtaatgagaatgcctcgggcactttggcttcaggggctcccaatgttctgactgtctacgtcggcgctcctccttcataa

SEQ ID NO: 78 - DNA, 7449 bp, Bacillus deramificans
  source 1..7449: mol_type = genomic DNA
cggaacgcctggctgacaacacgaacgccaacacgatcggagccaaagaaacaggtttcaagcacgcggtgggaaatatcttcaataaaaaaggagacgagctccgcaataaaattcacgaaatcggtttttctgaagatgaagccgctcaatttgaaaaacgcttagatgaaggaaaagtgcttctctttgtgacagataacgaaaaagtgaaagcttgggcataaagcaaggaaaaaaccaaaaggccaatgtcggccttttggtttttttgcggtctttgcggtgggattttgcagaatgccgcaataggatagcggaacattttcggttctgaatgtccctcaatttgctattatatttttgtgataaattggaataaaatctcacaaaatagaaaatgggggtacatagtggatgaaaaaagtgatgttagctacggctttgtttttaggattgactccagctggcgcgaacgcagctgatttaggccaccagacgttgggatccaatgatggctggggcgcgtactcgaccggcacgacaggcggatcaaaagcatcctcctcaaatgtgtataccgtcagcaacagaaaccagcttgtctcggcattagggaaggaaacgaacacaacgccaaaaatcatttatatcaagggaacgattgacatgaacgtggatgacaatctgaagccgcttggcctaaatgactataaagatccggagtatgatttggacaaatatttgaaagcctatgatcctagcacatggggcaaaaaagagccgtcgggaacacaagaagaagcgagagcacgctctcagaaaaaccaaaaagcacgggtcatggtggatatccctgcaaacacgacgatcgtcggttcagggactaacgctaaagtcgtgggaggaaacttccaaatcaagagtgataacgtcattattcgcaacattgaattccaggatgcctatgactattttccgcaatggttgtaaaacgacggccagtgaattctgatcaaatggttcagtgagagcgaagcgaacacttgattttttaattttctatcttttataggtcattagagtatacttatttgtcctataaactatttagcagcataatagatttattgaataggtcatttaagttgagcatattagaggaggaaaatcttggagaaatatttgaagaacccgaggatctagatcaggtaccgcaacgttcgcagatgctgctgaagagattattaaaaagctgaaagcaaaaggctatcaattggtaactgtatctcagcttgaagaagtgaagaagcagagaggctattgaataaatgagtagaaagcgccatatcggcgcttttcttttggaagaaaatatagggaaaatggtacttgttaaaaattcggaatatttatacaatatcatatgtatcacattgaaaggaggggcctgctgtccagactgtccgctgtgtaaaaaaaaggaataaaggggggttgacattattttactgatatgtataatataatttgtataagaaaatggaggggccctcgaaacgtaagatgaaaccttagataaaagtgctttttttgttgcaattgaagaattattaatgttaagcttaattaaagataatatctttgaattgtaacgcccctcaaaagtaagaactacaaaaaaagaatacgttatatagaaatatgtttgaaccttcttcagattacaaatatattcggacggactctacctcaaatgcttatctaactatagaatgacatacaagcacaaccttgaaaatttgaaaatataactaccaatgaacttgttcatgtgaattatcgctgtatttaattttctcaattcaatatataatatgccaatacattgttacaagtagaaattaagacacccttgatagccttactatacctaacatgatgtagtattaaatgaatatgtaaatatatttatgataagaagcgacttatttataatcattacatatttttctattggaatgattaagattccaatagaatagtgtataaattatttatcttgaaaggagggatgcctaaaaacgaagaacattaaaaacatatatttgcaccgtctaatggatttatgaaaaatcattttatcagtttgaattatgtattatggagctctgaaaaaaaggagaggataaagaatggctaaaaaactaatttatgtgtgtttaagtgtttgcttagtgttgacctgggcttttaatgtaaaagggcaatctgctcatgctgatgggagcacgacaacgatcattgtccactattttcgccctgctggtgattatcaaccttggagtctatggatgtggcctgaaggagggagtggagctgaatatgattttaacgggacagattcatatggggaagtcgccaatgtttccatcccaggaaacccaagtcaggtaggaattatcgttcgcactcaagattggaccaaggatgtgagcgctgaccgctacatagatttaagcaaaggacatgaggtatggctggtccaaggaaacagccaaattttctataatgaaaaggatgctgaagatgccgctaaacccgctgtaagcaacgcttatttagatgcttcaaaccaagttttagttaagcttagccaaccgtttacactcggtgaaggagcaagcggcttcacggttcatgatgacaccgtaaataaggatatcccagtgacatctgtgacggatgcaagtcttggtcaaaatgtaaccgctgttttggcaggtaccttccaacatatttttggaggttccgattgggcacctgataatcacagtactttattaaaaaaggtgaataacaatctctatcaattctcaggagatcttcctgaaggaaactaccaatataaagtggctttaaatgatagctggaataatccgagttacccttcaaacaatatcgatttaaccgtaccaacaggcggtgcccatgtcaccttttcctatgtcccctcaacgcatgccgtctacgacagtattaacaaccctggcgccgatttacctgtaaatggcagcggggttaaaacggatctcgtgacggttactctaggggaagatccagatgtgagccatactctgtccattcaaacagatggctatcaagcaaagcaggtgatatctcgtaatgtgcttgattcatcacagtattactattcaggagatgatcttggaaatacctatacacataaagcaactacctttaaggtctgggcacctacttctactcaagtaaatgttcttctttataatagtgcaacgggttctgtaacaaaaaccgtacctatgacggcatcgggccatggtgtgtgggaagcaacggttaatcaaaaccttgaaaattggtattacatgtatgaggtaacaggccaaggctctacccgaacggctgttgatccttatgcaactgcgattgcaccaaatggaacgagaggcatgattgtggacctggctaaaacagatcctgctggctggaacagtgataaacatattacgccaaagaatatagaagatgaggtcatctatgaaatggatgtccgtgacttttccattgaccctaattcgggtatgaaaaataaagggaagtatttggctcttacagaaaaaggaacaaagggccctgacaacgtaaagacggggatagattccttaaaacaacttgggattactcatgttcagcttatgcctgttttcgcatttaacagtgtcgatgaaactgatccaacccaagataattggggttatgaccctcgcaactatgatgttcctgaagggcagtatgctacaaatgcgaatggtacggctcgtataaaagagtttaaggaaatggttctttcactccatcgtgaacacattggggttaacatggatgttgtctataatcatacctttgccacgcaaatctctgacttcgataaaattgtaccagaatattattaccgtacggatgatgcaggtaattataccaacggatcaggtactggaaatgaaatcgcagccgaaaggccaatggttcaaaaatttattattgattcccttaagtattgggtcaatgagtatcatattgacggcttccgttttgacttaatggcgctgcttggaaaagacacgatgtcgaaagctgcctcggagcttcatgctattaatccaggaattgcactttacggtgagccatggacgggtggaacctctgcactgccagaagatcagcttctgacaaaaggagctcaaaaaggcatgggagtagcggtgtttaatgacaatttacgaaacgcgttggacggcaatgtctttgattcttccgctcaaggttttgcgacaggtgcaacaggcttaactgatgcaattaagaatggcgttgaggggagtattaatgactttacctcttcaccaggtgagacaattaactatgtcacaagtcatgataactacaccctttgggacaaaatagccctaagcaaccctaatgattccgaagcggatcggattaaaatggatgaactcgcacaagcagttgttatgacctcacaaggtgttccattcatgcaaggcggggaagaaatgcttcgtacaaaaggcggcaacgacaatagttataatgcaggcgatacggtcaatgagtttgattggagcaggaaagctcaatatccagatgttttcaactattatagcgggctaatccaccttcgtcttgatcacccagccttccgcatgacgacagctaatgaaatcaatagccacctccaattcctaaatagtccagagaacacagtggcctatgaattaactgatcatgttaataaagacaaatggggaaatatcattgttgtttataacccaaataaaactgcagcaaccattaatttgccgagcgggaaatgggcaatcaatgctacgagcggtaaggtaggagaatccacccttggtcaagcagagggaagtgtccaagtaccaggtatatctatgatgatccttcatcaagaggtaagcccagaccacggtaaaaagtaatcgcatgttcaatccgctccataatcggtcgacgcggcggttcgcgtccggacagcacatcaccgaaatatttcgacggcccagccggctagcgcgttaatccgcggatatatagcggccgcagatctgggaccaataataatgactagagaagaaagaatgaagattgttcatgaaattaaggaacgaatattggataaagtgggatatttttaaaatatatatttatgttacagtaatattgacttttaaaaaaggattgattctaatgaagaaagcagacaagtaagcctcctaaattcactttagataaaaatttaggaggcatatcaaatgaactttaataaaattgatttagacaattggaagagaaaagagatatttaatcattatttgaaccaacaaacgacttttagtataaccacagaaattgatattagtgttttataccgaaacataaaacaagaaggatataaattttaccctgcatttattttcttagtgacaagggtgataaactcaaatacagcttttagaactggttacaatagcgacggagagttaggttattgggataagttagagccactttatacaatttttgatggtgtatctaaaacattctctggtatttggactcctgtaaagaatgacttcaaagagttttatgatttatacctttctgatgtagagaaatataatggttcggggaaattgtttcccaaaacacctatacctgaaaatgctttttctctttctattattccatggacttcatttactgggtttaacttaaatatcaataataatagtaattaccttctacccattattacagcaggaaaattcattaataaaggtaattcaatatatttaccgctatctttacaggtacatcattctgtttgtgatggttatcatgcaggattgtttatgaactctattcaggaattgtcagataggcctaatgactggcttttatatgagataatgccgactgtactttttacagtcggttttctaacgatacattaataggtacgaaaaagcaactttttttgcgcttaaaaccagtcataccaataacttaagggtaactagcctcgccggaaagagcgaaaatgcctcacatttgtgccacctaaaaaggagcgatttacatatgagttatgcagtttgtagaatgcaaaaagtgaaatcagctggactaaaaggggccgcagagtagaatggaaaaggggatcggaaaacaagtatataggaggagacctatttatggcttcagaaaaagacgcaggaaaacagtcagcagtaaagcttgttccattgcttattactgtcgctgtgggactaatcatctggtttattcccgctccgtccggacttgaacctaaagcttggcatttgtttgcgatttttgtcgcaacaattatcggctttatctccaagcccttgccaatgggtgcaattgcaatttttgcattggcggttactgcactaactggaacactatcaattgaggatacattaagcggattcgggaataagaccatttggcttatcgttatcgcattctttatttcccggggatttatcaaaaccggtctcggtgcgagaatttcgtatgtattcgttcagaaattcggaaaaaaaacccttggactttcttattcactgctattcagtgatttaatactttcacctgctattccaagtaatacggcgcgtgcaggaggcattatatttcctattatcagatcattatccgaaacattcggatcaagcccggcaaatggaacagagagaaaaatcggtgcattcttattaaaaaccggttttcaggggaatctgatcacatctgctatgttcctgacagcgatggcggcgaacccgctgattgccaagctggcccatgatgtcgcaggggtggacttaacatggacaagctgggcaattgccgcgattgtaccgggacttgtaagcttaatcatcacgccgcttgtgatttacaaactgtatccgccggaaatcaaagaaacaccggatgcggcgaaaatcgcaacagaaaaactgaaagaaatgggaccgttcaaaaaatcggagctttccatggttatcgtgtttcttttggtgcttgtgctgtggatttttggcggcagcttcaacatcgacgctaccacaaccgcattgatcggtttggccgttctcttattatcacaagttctgacttgggatgatatcaagaaagaacagggcgcttgggatacgctcacttggtttgcggcgcttgtcatgctcgccaacttcttgaatgaattaggcatggtgtcttggttcagtaatgccatgaaatcatccgtatcagggttctcttggattg

SEQ ID NO: 79 - DNA, 2819 bp, Clonostachys rosea
  source 1..2819: mol_type = genomic DNA
tttcatcgatcctagctagattgactggccagggacaaccccaacaaaagtcaaatcacataccagcgatactggaaaactcttggctgtatttgtcacaatgttgttcaagactgcgttcctggggcttattgccacagtgaatttcgttcatggtgctgccattgggcatgctgcagagcagacttcccttgagaagcgtgccgaagctgcagatcggctagttttttgccattttatggttggatcctccatcagcattccctttaaaagacttacaaatcaccggctaactcctccatgctatagattggtatcgttgggaaccgcaacagcgcttcgcaatatgacgatgatatgcgccgtgcaaaggctgcaggtattgatgcgtttgccctcaatattggagtggacggatatacagacgctcagttagacctggcctacaagtcagcagctgacaatgacatgaaggtcttcatctcctttgatttcaactggttcaaaactggagaagctgctactgtcggccagaagattgccaaatacgcaaatcaggcagctcagctaaaagtagacaatcgcgtctttgcatcctcctttgctggagatggacttgatgtcgctgctatgaagaatgctgccggcgtcgacgtgtttttcgttcccaatttccaccccgaacaaacagccaatcctgatagtattgatggaggcttcaactggatggtatgtctccctctatccacataagccaacagcattaaactaatacaaaatcccaggcatggcctaatgatgggaacaacaaagccccaaagcctggaagctcaattagcgttgaagatggtgacaataagtatctcagctggcttggcaccaagccatacatggctcgtaagtactattttcgatcaatttagacaacgcaagtaacaagtagtagctatttctccctggttcttcactcattttggaccggtaagtctcaccatcatacaagtccagtcaatcgctaaaatcgaaaaataggaagtctccttcagcaaaaattgggtctttccaggaggtgccttgatttttgatcgctggaatcaaattttagacaaaggctttcctctagtcgagatgatcacctggaacgactacggcgagtctcatcacttcggtcctctcagctcgccacattatgatgatggcaactccaagtggaccaacgatctgtaagctggagtgttcccagataaagtccgccacctaactaattcttaacctaggccacacaatggatggctcgagctttccaagccctttatcgccgcctataaagcaaaggagaaggccgtggataagtatatcaccggtgatcaaatcgtctactggtatcgtcgaaccttaaaaggtctagattgcgatgctaccgataccactgccggtaggccagccaacaatgatagtggtaactacttcatgggtcgccctgacgggtgggagttaatggatgacgtggtatatgttgccacattgctcaaagaggccggcacgcttaccgtcaactctggtggtcaatcagtcgagaaagaggtccccgccggggccaacttgattcaagttcccgctgctgtcggttcacaaacgttcagtctgtcccgcaatggcaaagtggttcttgaggacaagtccctgatggacatctctaacatctgcccgtgtggcttgtacaacttcaacccctatgtaggaactgttcctcctggtgagagcgatcctctgcagcctgacggtctagcttctctcactatcggcctccacgtctctacctgccaagccacaccgtctcttggcacaaaccccccaatttcgaccacaggaggctccccgcccccttcgagtacgggaagctctccaccgccatctaccacggccggccctacatccacgggcggctcagttccatctcagacctcatcagtacccgcacctacaagcacaggctccagccgtaagtctatgtctcacaacctaccttttcaaaggcggatcagaaagttaatacgtattatagaaccctgcaatggcggcacaaatgctgatggtgagtcgggcaactattctggtctgtgtagctttgcctgcagctacggatattgccctcctggtccgtgcaagtgcacttcaaatggaacacctggaaatcctccttcgggagacggaaggaacggatgtcctgcggatggcctaggcgatggatacaaagggctgtgcagcttcgcttgtagtcatggctactgccctgatactgcatgcaaatactgttgataatgccctaggcggcctcaaccatatgcggcaagaaaacattcttgctggacaattcgaaattgaacaccgctttttcaaacctttgcctcccacattgcagatgactactccatatttcttgtgatcacttgtccgtgcatcatcattccattatccggcactccattgatttcaactaatttaccagttccaggtcgagtgcgaatgagaatatgcctttgttctctaggagcactggacggggctattctgacagctgtagaccttggtgcctccagtaatcacaacattagaccaagtccagccagagcaagagccactaccacagaccacgacgacattgtatcctccagaagcgacacctcccccaccagtgatattctccaccgtcaggccagtgatgggcacgccagttgtgggatcacctttgagatctcctccgttgtaattctgctcgataagaacaccatacctaagatccacatgaacgaaattct

SEQ ID NO: 80 - DNA, 2429 bp, Trichoderma atroviride
  source 1..2429: mol_type = genomic DNA
ttggacgttaccataaagagaagcttcttttcaagatcggcattcggtccgaatgacatgcttgctgctgtaaagtaccaaacgggcaagtgttgtgatactataactttacgatatcgacgacgtcttcatatcaccacacatagctttcattcacaattgatgctagactgtttgatgtagagtatgtatgtcacgaagactctcaaaggctctgaaggaccatacttgaagatgaaaatttggcaattaatgtattagatatcaagatatttccagcggttatgcatgcgaaagccgacggatatttcatattgactgacacgtctttaagaagatgtttgacaaatgatcgacacgcccagaaatgtcgatcccgagaattgttcattacctattcagcccactactatatagagcatagaaatctccccagataaccacagctcttcaggccatctgccactcattccaagtaattcttcaagggctctatcaagatgttgtctgcatatgccttttcgctgctagtagcttcagccagcgcctggactcctcagtccaacgcaaagggtcagtaaaggctcaaatcacagatggtctattggacaacagcttacgaatgacacagtcttcagccgagataccgaaggcgtcatgagatggctacccggcaacgacaagttccgcggtgtcaacctcggctcgcagttcatcattgaaccatggatggcttctgatgagttctcaggcatgggctgtggcggactcaacgacgaatggtcttgcgtccaaagcctcggccaggatgctgctgacgccgccttccagaagcactgggacagctggatcactcaagacgacatcacccagatcaagaatctgggactcaacacagtccgtatcccagttggcttctggatccgcgaagaccttgttcaacaaggcgaattcttccctcgaggaggtattcagtacctggaccgtctagtcggatggtgcaatgacgcaggcatctatgtcattatggatcttcacggcggccctggagcgcagttccctaaccagcaatacactggccatgtaagagaagcagtccgatgccttgaattcttcaagttctcgactaatagtatatcaatagggagtctcacagcctgggttctacaccgaggcaaactacgaacgagcagccaacttcctagagtggatgactgagcgcattcacaccaacgccacctatgcatccgtcggcatgctagaagtcatcaatgagcccgtccactctggtgatttccccagccaagctgctgacatggtcaacacttactatcctctcgcctggaaccgcatccgtgatactgaaagcaaactgggcgtctctgacgataagcgccttcatatccaattcatggttcgtcctcctccctagctatcaaatgcctttgatcaacagcctttgatcaacaagacaagctaacaaactcgcaataacaggcctcggcctggggctccggagacccaaccagcgccctccccagcaccgacttcgccgccttcgacgaccaccgctacctcaaatgggacaccagcgtcaccgccactaaagacggctatctcaacgccgcctgcagcgacaagcgcgacgacaacgtcatcgtcggcgagtggtccatctccgtcgccgacaacgtccaggacaacgacgagctcggcatcaagaaccgctccgaccaggccgactggtaccagaagttctgggccgcccaggtgctcgcctttgagaagtcggccggctgggtcttttggacgtggaagtgcaactggatcacgggatatgatgactggaggtggtgctatcagtctgctgttgcggcgggtgcgattcccaaggacgcaggcagcgcggctagcattaacccgtgttaagaagcagccgttgggttcattttgatgtatgaaatggaagcttttgtgggcgattatggctatactattatataatttgcttcttgcatgtagacgtacctgtgatgtaagcacaactatgaaaagtatcacgaaactttgccttctaagagcacatatgaagtgaaaaaatatttatatcaattgaacagagttaatctgtcctaaaaatctcaaaaacccccatggggtgcctcatcagccacccagtgtttaaatcatcgtgtccaagtaacgtttcaaatctccatttcatcgagtaacttcttctagctgttcaaccacccaagcccagaaatatgacattcctcatattcaacctctctgcgtagtggaataggctggatcgcctggcccttgatcggtcaagggtggttcggtaggtagaacaatgataacgtagtgctcttcatcgcagtatgcgcacttgtcggcattgcctttctcgaccactatgacgc

SEQ ID NO: 81 - DNA, 3391 bp, unidentified
  source 1..3391: mol_type = genomic DNA
agtagagtatgaggacaacacgattttgactgagagtactatcagctttagacttgccttttattgctcttttgtctatgctcaatgttatatcggtggggtgaatgcaatccaccccgcagcctgcccagtcacaattggacatggctgcctcgacctttgatgtccccgacattccaccatcccctccggagtaattcacgccacaccaagtgatgcctctttggataatgaagctgacaattgggctagatccgggccgaatggtagtcgaatctgatgcggagttgtgggctgaccggcagactcttaacgggactacgatggatgcatgcatgaacagtatgtgaggggtgtcgaagacaacaagactcgaattcagcaggggtcttatactcggaggcggtgattgaagtataaagaggcggatattcctccgtcgtgggtgctgtcctgtcgatcgtccttcatccagcatctgttgatcattgaccggcatcatgttgaagctcacggcgctcgttgcgctcttgctgggcgcggcgtctgctacgccgactcctagccctcctgccagcgatgagggcatcacaaagcgtgccaccagcttctattaccccaacatggaccatgtcaatgcgcccaggggtttcgctcctgacctggatggcgacttcaactacccaatctatcagactgtcaacgcaggagatggaaatgctctccagaatgctatcaccactgatggaaagggtggctctcgtcacccacagtggtttgcttcacagccacgagtatgactttgatgtaaattcttgtacaaacgggtatctaacgttagtgtccaggttgtttacattcccccgggaacatatactatctccaagactctgagattcaacactgataccattttaatgggtgacccaactaatcctcccattattaaggctgctgccggtttctcgggcgatcagactcttatcagtgctcaagacccctccaccaacgagaagggagagctttctttcgccgtagctattaagaacgtggtattggacactacggctataccaggtggaaattcatttactgccctatggtggggtgttgctcaagctgcgcatctgcagaatgtacgcattactatgagttcctcttcgggtggaaacggccataccggcatccggatgggtcgcggctcaacactcggcctcgccgacgttcgcgttgaacgcggccagaacggtatttggattgatggccatcaacaagccagcttccacaacatttacttttttcaaaatacgatcggcatgctcatcagcggcggcaataccttcagcattttctcgtcgaccttcgacacctgtggaaccggcatttccaacactggcggttcaccctggattgccctgattgatgcaaagtcaatcaactctggtgttacctttacaactaatcagtttccttcatttatgattgagaatctgactaaagataatggcacacctgttgttgttgtccgaggctcaactttggttggcgcttctagccatgtcaacacttactcttacggcaacaccgtgggcagaaaccctacttacggcgatgttacatctagtaacactagacctggtgctcttgctcctggtggtcgttacccttatgtggctccccctacttatggagatctgcccatctcgagcttcctcaacgtcaaggatccagcgcagaacggcgggaggacggtcaaaggagataacacgatcgatgaggcagccacgctcaatgccatcctggaacttgcagcaagccagaataaggttgcttattttccttttggcaagtaccgggtggattccactctttttatccctaagggttcccgcatcgtgggtgaggcttgggccaccatcaccggcaacggcaactttttcaagaacgaaaacagcccacaacccgttgtctcagttggtcgtgcaggcgatgttggaattgcacagattcaagacatgcgttttaccgttaatgacgttctttcaggagccatcgtcgttcagttcaatatggctggcaacaaccctggtgatgttgctctttggaactctttggtcaccgttggtggcacacgaggtgcttcagctttggctaatgcttgtaccaacaatagcaatgaatgtaagggtgctttcattggtatccacgtggcgaagggatcatctccttacatccaaaacgtttggaactgggttgcggatcacatcgctgagaacttcagtggcggcacttcaattgctggtaaaggcggaattttggtgcagtctacgaaggcaacctggctttatgcgataggaagtgagcattggtggttgtatcaactcaatcttcacaatgccgccaacgttgttgtgtctctgctccaggcggagaccaactaccaccaaggcgccaacacgcagcagattcctcccgccccctgggttgcaaatattggtacttggggcgatcctgatttcgcttggtgcaacggtggtgataaaagatgccgtatgggccctgcaaacttcatcaacggaggttccaacatctacacatatgcctccgcggcatgggcgttcttcagcggccctggccagggctgcgctcaattcgaatgtcaacgtaagctctgatatctctttcatttcttagaatatgactaacattgaataacagaaaccatgcactggattgccagcacccccagcaaccttcaggcttttggactctgctccaaggattccgtcaacacactgcgtctgggtgatggcacattcatcaacacccagaatggatacactggcggctggactcctggcggtggtgatgttggccgttatactacttaattgacgcttcgaatgagctcaacatcttgagctagaacgtagtgtatgaagagccacatataacgcgctatggagatggctgcgcaaaaaagtcatccatttgtacatatctatttagttgtcaatatgaatatatgcacatacaacttctcaagttgtcaaagagacaagacatagaatctcttcataactcaaccaaacggcggcatcacttctcacctggaactataacaagctacctaatcacaggactgctgtaacttgatctttcgacagttttcaatttctattagcttgaggtgaaattggtctcttccaaatcgtctattatgtgtcctctttcgaagcgcggacttaccactacaagcctaagcaagaatgatcattttgttgttaattttgagtctctgcatgatgagagtatagtggtcggagcgataaacaaggccgcaagtaatgttttggaattattattctgtatagaatgatggattcatatg

SEQ ID NO: 82 - DNA, 1400 bp, Alkalihalobacillus bogoriensis
  source 1..1400: mol_type = genomic DNA
gccctaataatggaataaatgtccgataaaaaaactcttatctcccccatctgggtaaagaaacgatgaaaccgactaatcttacttattaattgcatctaaagcaaaccaactgttaacctgtaagtaagaaaccatacaggaggaaggaaatgaaaaatctactgatcgcatttttgcttatcctttttgttacaggatgcgctgaacccgaacaacagcaaacagaagaagccacagacaatatagaagaaacacaagaagaattagaagtcaacgaagaaccgattgtcatagccgacaaccttgatatcccatggtctattgaaaaagcaggagacacattttatataacagaaagaggcggacatattgttaaagtagaaaatggggcaatggaacgacaaaccgttcacctagaacaagagctttcctctgtcccagaagcagggttactagggtttgtgttaaaccccaacttccctgacactaaccttgcttatgcatactacacttacgaaaaaaatgccgacccttataatcggattgttacgcttcgctatgaaaatgaccaatggcaagaggaaaatattcttcttgataacatcccaagtggtacatatcatcatggaggacggttaaagattggtccagacggattcctttatgctacaacgggtgatgcatcgattcccgagattgcacaagacattgactcattaggagggaaaataattagagttgaattagatggagcaattcctgaggataacccttttgcaaattcttctatttatagtttcggccatcgaaatccccaagggttaacatgggcaatagacggctctttttattcaagtgaacatggaagtagcgctaatgatgaaatcaatgaaattgaacccggactcaattacggttggcccattatccaaggagacgaagaaagagaaggtatggttagcccgttattcacatccggaaatgagtcaacatgggcaccatccgggatggattactataataatcggctttatgttgctgcattaagaggagccgctattattgaatttaatcttgaaacaggcgagcatcaagaaatcatcactgacctaggtagaatacgggatataaagatagaggatgatacattatattttatttcaaacaacacagatggtagagggaacccagaagaggatgatgataagctttatcgactttcgctacaagagtgagtttggagaaatcagtccgaatgttttcggactgtacttccctaatgagtaggcgtatatttattgcttccaggaagctttttgattttattccacatatcaatggcttccttcctactttttcctttgtttttcgggtcagcaaaaaaatcacgaataaat

SEQ ID NO: 83 - DNA, 2310 bp, Talaromyces pinophilus
  source 1..2310: mol_type = genomic DNA
atctttccgatagatctggattacaaccattgcatagggttattgtttcggctacacaagggcgccaccaaccgcaactccaatggctgaacgttagtacctgacgctaatgcacatgagtgtcatccttgtctcccgtgcagcctgtgctagaagacaatactatcatactctgctcctactcgttctcacatgattttttggtcaaacgaaaggggttgtaataatgttggaatgtaacacacacccttacggtccgtccgaagcaatgcatggaatgcgccacggtcatcctatatgctacgtgacgcggaacatgccatgttatgcaatcgattttccgacataatcgagcctgggaaggctgtattcgataaccatgatgttcccacgaacaactgattacgaaacctatataaaaggtttcaatagcccctacacccggtctcgcaaacctgtaggtgatcggagaatcagaagcaaaagaaacaacggctaccatgactttcaagactagctatctagcttctgccttgctcttgctcacagcaagggcctctgcacaaactgcaaatgcggaagcagcattcgcaacacttcaagagtggtacgatcctgtgactgggttgtggaatactgccggatggtggaatggcgccaacgcgatgacagtcattgcggaacttgcagcagttgacgccagcattgtgcaggacgcaatctcaattttcgagacaacctttagtgttgcaccgtcggttaaccctagcaacggagttgaaaagagtgtaggcaccaatgggctcattcaaacaacatacccagctggatggccaaacaatacaatcagtaagcgcgccatacaggattctacagaccctacagtttggctggacggtgcaaatgatgacgccgaatggtggggtttggcctgggtcgctgcgtatgatgttacgggaaacgaaacgtacttgaacttggcagagggcattttcaatgagattgtaagctaaatgctgtcacgccggcgactttctgttagggtaacataaatactgactggcttgtctctgctataggctgccggctggggaaccaattgcggaaacggtggaatttattgggagaccaccaaccactatgtcaacgccattgctagtgaacttttcatttcactggccgcacatcttgcgaaccgcgtgcccgccaatgcggcaacgtataccgcttgggcagaagaggcatggaactggttcgcaagcaccggaatgatcaatgcaaatggcaccatcaatgatggcttaacgactgactgtgtcaacaatggacagccagtgtaggtcttctaagtcccgaattaattgccatcaaggggaaaaaacttacacttattcatagatggtcttataatcaaggtgtcatcctcggaggcttgactgaactcaacaaaatttcacccaatgagtcttacatcgaatcggccaacagtattgctcaagcagccatcgccgcgctcgcagactccaactatgttatccatgattacgcgtgtgaaccttctgactgtgagcccaatggaactcaatttaaaggaatctttatgcggaacctgctactgctgcagcgagcgtcaccaaacgacctctatagcaaggttattgaagcctgcgcagccagtatttgggccaatgatcgtgataccacgaccggcgagcttggtgtgaactgggcaggaccttttgtgggcggcgatgcgacaacacaaagctcagcgatgggtgcattggttgcagctatttctgtcgaataagtggtgactgttgaccaaaataggacttatgacaattggcaaggatcccaatttcgggccggcagcttcgttcagcttcagcctgtataagtatcgcgctaagctgttgtgggaaggccgaaaacgcggggattgcttttccacatttttgcctgtacatattcaattcatgaaatggaacgattcggggggataattgatcctcggagtctggaaacaaacattgacaatagctatgagcctcagatgttgcagtagcaacccaaacaggtagtagtgggtggtaatgaggctgtttggtgatctattcaggggccgtggcgcttttagattgtgtcaacttttcaagtgaagccaaggcccaaaagaaaaacagagaggctagagctaaacgtgacctagcacgctaaccccgttcggcgagtggagtagtcagcaagtcacgtgccagccacagcgtttgccaagaaaaagaaaagacagcctgaccctaaccctgg

SEQ ID NO: 84 - DNA, 1264 bp, Fusarium solani
  source 1..1264: mol_type = genomic DNA
ttacaagactcaactactatctcgtcgttgttcacataacagctactacctctatactgtccacctccttgacgccctttctcaccccttattcacaatcatggtggccttcagccgtattgctgtcaccactctcgcccttggcggttctgtaagcgctcgtcgtagaggagaatgtcctgctgctgacgctggcaagaccgcacaagccaagcctgccacggcggcgagggctactgggctcgccgacttcaagccaggtgtgcagtgggagatttgtattcatcatcccatcaagcatgatagtgccgcagacttgatcccgaccaaggccaaggtctgggatatcgacatgggccacgctcaggagttccctaacatgatccccatgctcaaggtaagcagacttacttcaacattttggtatggataagccatactaaccagattgcctaacagagcgctggcaaattcgttatttgttacttcaacgccggagcccttcaggactgggatgacgacaagagcaagttccccaaggaggtcatcggtcactccctgtcctacccctacgatagcgaagaatggtacctcgacatccgggactcgcgtgtcctcgagttgcaaacggcacgactagacattgctgccaagatcggctgcgatgccgtcgatcctgacaacgttgacgcctggcaacaagatgacgaagaccccacgggcttcaagctcaagtcttccgactacaccaactacctcaagaacctcgccaagtatgcccactcgatcaagaccaaggacggtcagcccctcctcgtcgggcagaagaacgcccccgagatcgccgaggacctcgtctcgaccctcgactttgccgtgctcgagtcctgccgcggcaacagcgaccccaacgaagagagctggcccttttgcgaggacttccagacctacatcgacgccggcaagcccgtcctccagatcgagtaccccccctcggtggagaagacgggcaaggtcagcgcctcggataacaagtactactgcactgccgaggatgaggacaagggcttcagcaagatcatcaagtgggcttctgctcagcttgatggctggggtcagtactgtggcgaggagcccttccgtactcctgcggccaagtattaaatacatacaaaggctcaagaccttctccctcaggggacttgaaaagtactgttggatctttgacgtgttggacgctccttttgggcattgtatataaatc

SEQ ID NO: 85 - DNA, 1115 bp, Ostropa barbara
  source 1..1115: mol_type = genomic DNA
ttccataatccataatccattcgtctattcatccctcatctccacctaccatccaaacctcaaaccccaaacctccccaacttttcatccacccgccaaaatggttctcccatcctcaatcctcctccccctctacagtaagcgatttcctctaaacccccctttccaacaccatctaacaaccccccacagtctacccctccgccagcaccccctccccctggcaacccctctacgactccctcggcacccacagcaatatccacttcgacatcatcatcaaccccggctccggcccgctcctcgtgcccccgaccgatatccagctctcggactacatgcccgcgatcgcgaaactgagaacgtataagaatgtggatttgttggggtatgtgcatacatcctggggcctcgcttctcaaagtgatttactggcgaatatctcccgctacgcgaccgtacgtccctcccaccatcctattcctcgaatgacattcactgacgcgaaacttgtagtgggagacggtgaatggacaggatgtgcatcttgatggcctgtttttcgatgaggttgttacggcgtatgatgagacggattacgacctcctttccaccgccacaacattagcacgcacgaccccgaacttcaagaaaatcgtctttaaccccggccaaccggctgatgagcgctattacgcgctcgcgaactacctcaccgttttcgagggcacggctgcggcgttcgacagcagcacagtcgcggcgctggatgttgctacaagggccaatagttcggttgttattcatgatttcacgggcacggaggcggagcaggcggtatgtatttcccctgtggtgtgaagggatgagggttaaggctgatgagaaatagatcctggtgaatgagcttgtgggattgggactgggcagtgtagatgtgacgacgttggcggattataatgattggagtgcgctgtgggcggattttacgggggaggttggggatgcggtatgaagaagggacttttgaggaagcgcttcttcgggcggggttggcattttgggattggggttttggttcggtattaggtgattggagtttcgggttcttggag

SEQ ID NO: 86 - DNA, 1019 bp, Stenocarpella maydis
  source 1..1019: mol_type = genomic DNA
tgtcttctccctcgcatcacttctcccacggcttacccacaagcacccgtcggtccctaccatacctacttaagtaggtatacttaacacgtgactcaagatgcacagtttctatctcttccctgccgtattagcagcaaccgctgcttccgcaaccaaaatcctgctccctttgtatgtttatccgactacaggagcgggatggactagcatctacaatgccattgagacccacccatccatcgacttccagatcgtcctcaatcccagctccggcccgggcgggtcaactcccggatacaacactcactggatcagtgccgtctcaaagctccattcctatgacaacgtcgacaccttgggttatgtgtctgccggctacggctccagggacctagatgagatcaccaccgacatcaaagactggaaccaatggaaccactacacgggggcagacatcaccatagacgggatattcttcgatgagacgcccaactggaatggcacaaggggcgcaaacgacgtcagcttcatgcagcaggtcacaaagctggcggaccgtggggggtataccaaggtgttcaacctcgggcaggcgtgcagccacgatgagtactttcagatcgccgacacggtcgtcatgttcgagggcgaggccgagtcttacaacagcaccgtgctggacgacgtcgtggagagtggagtggcagacaggtccgccatcctgatccatcattttgaggggagcggtctgacgtcggggttcgccgtgagatgggtcattgaccttgtaaacagggggctcggcagcttcgccatcatcaacacggactggacccaggcaaactcggatgttgcgccgatgggaatcagcatactcgctgatatgctggagtctgtactagaccaccaatactaggttttcctctctataaaaaaaatggcgtttatgcttatggtttttatatcttcgattataaattcagatatgactaacgataaatatttttgtctcatct

SEQ ID NO: 87 - DNA, 1256 bp, Urnula craterium
  source 1..1256: mol_type = genomic DNA
tcccagtaagtcgtcctacacgtcggacacccattatattcactctttgaaataaaccaaaccaaaccgaagcactctttcactacatactactacaaaaatgacatcgaaaatactctcgttagcattagcaacgctaaacgtcgcatatgcagcaacaacaatctgtagcaccaaatgcccttacacgaatctcggttcttccgatgcagtaacgaaatccgactggtggaaacctgcgcttggtgctacttggcaggttgtgttgacgcctgctgatgatgatgccgggccgcagttgacggacgattatgaaggtctcctcccctcttctctagatttaatctaatctctctcgaattcccttcagctagctaatatgcccctgaaataaatagtctacgaccttgacgtctttgacgtcgacgctagcgtcttcaaatctctacaagcaaaagacaagaaagtgatatgctacttttcggcagggtcctatgaagactggcgcgaggactgtggatgtttcaagtccagtgacttaggttccgaccttgacgggtgggaaggtgaagcttggttgaatactgatagtcagaatgtgaggaatattatggctgcgagacttgatgtggcggtggaaaaaggatgcaatggcgttgatccagataatgttgatgggtatgataatgataacggtatgccttttccctcattcttctgttcaattttattcgacgctgatagaatctctttttcttttttcttttcgggaataggtctgggtttatccgagtccacggcgaaatcgtatctgcagttcttatcagacgaagcacattcaaggggtttagctattggtctaaaaaacgctggaagtattgcggcggatgtagtggatagtatggaatgggaggtcaacgaagagtgtattgcgcaggagaactgtgaagattataagacctttgttgatgccgggaagccggttttcaacattgagtatccgccggaggatcatatcgatgatgcgtggacggaggcggagattgaggagaggtgtgcgcagaaggcggatgctagcaatggtgctaccaagttctcgacggttttgaagaaccatgagaatgtggatgaatggatcagaacttgcagtgagtaggatggctaggtaggggtgggttggttggttgatgttgagggagattgagaagaaaaataaaagggaacaaaactgatgggatttcattacagtcggctct

SEQ ID NO: 88 - DNA, 1166 bp, Bjerkandera fumosa
  source 1..1166: mol_type = genomic DNA
atgtcgtagacactgcagacggtcgagaacgctctcatttgtcatataaaatggggagggaattggaggggttggtcagtggcattcgcatctgtctgccatgttcaccttcgctaaaatcttcacgacagcttgctccctagcgggactctttgggtccacctttggcacgggaatcatcgtacctttgtacgtttggcctggggatccgaacgtctgttcaggttggacacccctgttcaacgtgtacgcctgccatgtctttacctcaacgccagagcactgacgtagtcgctcagcatctccaccacaccctcgctcacgttctacgtggtcatcaacccgaacagtggtcccggagatccgagcacccagcccgtcgacagctactcgacgtgtattcagcagctcaagggcgccaagtcagggtcaaacctgagggtcttgggctacgtcgccacgggtggtggctcgtcgactacggttgtgagagacatcacgacgtactcggggtggaatgctgcgtacaggccggatggcatattcttcgaccaaggctctacagcgtcctcccaggtatcgacttatgccgggtgggcgaaccaggcgaggcagatcttgggtagctctacctacgtgagtacccgtttcctgattccttagctagcttgtgccaatatttgcgttgtagacaattgtgaatcccggccagcctcctcaggataacgcatatttcaactcctttgaccaaatcgtcacccgagaggacttcttggcccagttcaggtaagaagggatgtgtgcatcacatgtacccgtatctaatctgtttcattccagtccgtcccaactctcgattacgccggccagtccagctgcgaaacaagctgtcatccttaccgacgccttcacgttcccttccagcgtcgtctcgcagctcgtttctggtaatcatatcggctctctttgggtcacggatgacacccaggcgaaccagcagaacccctatgactcactcccgagttacctcactacgtttgtcaacgctgtcgtcgccgacaattaggtgtccctctgtcgagacaaatccaaagtgtagtaattcaatgatcgtggttccatgtacattattagtagttcttgcgtactttgaaacacgtagtagc

SEQ ID NO: 89 - DNA, 956 bp, Pseudoplectania vogesiaca
  source 1..956: mol_type = genomic DNA
tcattattattactagcttttgaagtaaacccacctcctagcctccacgcttcatatgcatatgaacaacaactgactaaagttagagaacctcactaccatgtccctctctttaagtccagtcgcaactaccggtgttctcctccctctctacatatacccagcccccagtaccgcctgggatcctctctactccgcaatcacaaataacccatccgtaaacttctacgtgataataaaccccgactccggcccaggaggggacgagtttccagccagcgactacatctcagccatccaaaagctaaaaacctacgataccgtcacaccgttaggttatgttcataccacttttggcgaccaaacaacttcggccgtcgaagccaatatcaccaagtacaaaaactgggacacctactcgaccacctccccgatttccgtggatggtatatttttcgacgaagcgccttcttccgctgcagacgttagttacatgacgactttatcaagctcagcaaagacaacgtttggtacgggtcgagattttgttgtgttcaatcctggctcgatagtcgatccgggttatttcaacgctgccgacgctatagttatttttgaaaatacggaagcaacctatagtgagagcgtgtttagttctcagagtggtgggacctcaagacagaaagctgctattatacatgattttactggaagcgagagtgagcagacgagtgttgttgaaggaatggttaaccagcaggcgggattggtttatatcaccgatcagagctcttataattccttctctggattgtggagtagctttgtttcggctcttcaagcggcaatcgcttgagcttgtgttaatttatgagggcatgtgttagcattttggatacatatagcttcagggatgtcatctttggtccgaaccgagactagcgtatgttcttttt

SEQ ID NO: 90 - DNA, 15425 bp, Effusibacillus pohliae
  source 1..15425: mol_type = genomic DNA
gggaagtctttataatgaacccattacttctttaaagtcctggagagaaaatttattaaaagctcatgctgataaagaattaaatcatttaacaagtgatatttttgaacaaaatggtgaaagtccctatggagtatgcggtatgatcggcggaacatgggagtggactagaagtgagcttaaaacaaagagagctttccaccctatttttgagaatgtaccatttaatagtgttaactcatttgccgttcttaaaggaggatcattcttctctcatccaggcttaatgttcccttcttttagagcaaaagatattcctttctgtcgacacaatgaaatggggattagatgcgtaaagaatattccagtatataaaattagagaatcaattaatgggccaattactaataaagcaatttattaatcattctaggttagagacttgataaaagtatactaacattgtgtagtaatgttcagcttgtagaaaaaacaatgttttttctacaagattttattttaaatgcttttcaaaattatcagggattgagaatcagaaaaagagccattaagctcgatcttagctaggtattacgatcttctgtatattattgtgagaaatatagaagattcagttagttagcatttcgattttaagctgagcctgcaatagcaaagcatctgttttgattattctttttctgatacataagctaattttgtcgcttttcttttttgtcttttcacgcatttcgaggatgacttactataattctttcagcttttctatgtgttaagattcgaatagatgaaataactttaacaagttggtcaataagaacagatttaactttatgttaaaagagtatctcgtatagaacataagaagaatgacgagttttttaagattatcatcaattatgtgagaataaaatattataagggaaaatgaaggctgtcacgtttctcgacagccctagggaattcctctccttttcatttcgcccgtaatttcgggcacagtcccgtcggcaggcacattggcttctggtcgatcgggcttctcatgatgcagcattccaagccgaagacttcacggaaaaatggctgggtgaacacatcttccggtgttccggcgttgtatatttttccgtccagcacactgatcagatagtcagcatattgagcggcttggtttaaatcatggagcaccatgacaacggtgcggccatggtcgcggttcagctttttcagcagttcaagcacttcaatctgatgtgagatgtctaaatacgtggtcggctcatcaagcaaaagcaaatcagtgccttgcgcaagtgccatggaaatccaggctctttgtctttggccgcctgagagggcatcaagtgtccgatccttcagttcaatcatgcccgttgcttccagcgcccactctaccatgtcatgatcctcttgggtatgcttggataacagctttttgtgaggatgtctgccaaaatagcataattcctctaccgtcaatccttcaggagcctgaggagattgtggaagaatggccagtttttttgcgacttcttttgatggctggcggtggatgtcttttccttctagtagcactgtaccgctttttggggccatcagcctggcgagcgatttgaggattgttgatttaccgcagccattagcgccgatgagcgcagtgatttttccttcttctatctttaagtcgactccgtcaataatcactgtactgtcatatgaaagagtgagctggtctgcagccagttttcccatggtatcctctccctactgtttcctcgcttcgaatttcaataaatataagaaataaggcgcgccgatcacggctgtcagtattccggcaggtatttcaaccggaggcatgatgccgcgccctaacgtatctgcaattaataatataatagcaccaatcaatgccgatgcaggcagtaaatatttagctttttctccggtaagccgtctggcgatatgcggagcaagcaagccgataaaaccgattgagccgacgacggctacacagcttcccgccagcgccaccgcggtgaaaatcaggatgaatctcagccggtttgcgttttctccgagaccctgtgcaagctcatccccgagtgacataagatccagcttcggtatgagtatgcagacgatcggaaaaagaatcaaaagccatggcgcaagcagcttgacttcttcccagtttcttccccagaggcttcctgtcagccaaatgagtgcagcattcacgtcgcctggaaacttgaccatcatatattgcattccggcgtggcagaccgcgcctaaagcaatgcctgataaagccagtgaagagggctgaatgctcttttttcgggctatcattaataatagtacagcaataatggcggctccggcaaatgcggagaacggaagcacgtataccggcgactcaggaaagatgagaatcacagccatcgccgcaagtccggagccttttgaaatgccgacaacgtccggggaagcgagcggatttcggatcacaccctgtaaaatcgctccggcagcggcaagtccagcacctgccaaaatcgctaatataatgcggggaaggcgatattgctggatgataaattcaaaggaatgatccagtcccagcagattcgtcactaccgcatcaggtgaaatgtataatgcaccgattccaatgctgatgacggacagaacgattaaaatcacggccaatatgagtatcgccagtaaggggcgtttttgttttctggttgttttcttcatttcaggtttcgccctttccttgccaaatataagaaaaacggcgttccgataatcgcggtgacaatgccgaccggtgattcataaggaaatgcaatccatctggccagaacatctgcgtacaccagcaaaatggcaccgaacagtgccgaaaacggaagcacgtattgataatgttctccgatcagcttgcggacaatatgcgggacgagcagcccgacaaagccaatcggcccggcgacggctacggaagcgccggaaagaattaaaataatcaaactgatcagaatcctgatgccgttcatattttgtccaagcccttttgctgtttcgtctccgagaccgagaacagaaacagaaccggaaaatacgagggcaagcccgatgccaatgacagaaaaaggagcgatggttatgacgtcctgccagttgctgccgtcgattgcgcctgtcatccagtacagaacatcctcacctgactcatttaaaataatgatggcctgtgtcatagaggagaggaacaagtgcacggccattcctgacagcgccagcttgacaggcgtcattccgccggatgaggcaatcatatacacaatcgcgccgcctgctgccgcacccgcaaaagcgaatataacagatgaatagggcgatgccggcagaatgacgagagaagcaacaacaaaaagcgatgcacccgcattcacaccgaaaatttggggtgaagccagaggatttctggtcatagcctgcatcagcgcccctgctacagctaggctggcgccgacaaaaacgccgattaatgtgcggggaaggcgaagagtagagatgatgagctgttcctttgaaccgtcccatacaaaaagatatttcaatgaatctatgatgctgatgtctgaggctcctactgaaagattcagcccaagcccaaatataaaaataatcagtgcaatgataaacatcatcagtcttgatgatgagcgccgtttggctgaatgatacaacagtctcacttccttactgcgtctggttgcaaaaacgaagaagcaaggattcccctcgcttctcatttgtcctatttattatacacttttttaagcacatctttggcgcttgtttcactagacttgatgcctctgaatcttgtccaagtgtcacggtccgcatcatagacttgtccatttttcaccgctttgagatttttccagagcgggttcgttttccactcatctacaatggttttgccttcgttggctgagatgaacaaaatatcaggatcgattttgctcaattgctcaaggctgacctcttgataggcgttatctgacttcacagcgtgtgtaaagcctagcattttaaagatttctccgtcataggatgatgatgtatgaagctggaaggaatccgctcttgcaacgccgagaacgatgttgcggttttcatctttcggaagttcggcttttagatcgttgatgacttttttgtgctcggcaagcttttcttttccttcatcttctttatttaatgctttagcaatggtcgtaaagctgtcgatcgtttcgtcatatgtcgcttcacggctttttaattcaatcgtcggggcgatttttttcagctgtttataaatgtttttatggcgctcagcgtcagcgatgattaaatcaggcttcaaggaactgatgacctcaagattgggttcgctgcgtgtgcctacagatgtgtaatcaatggagctgccgacaagctttttaatcatatcttttttgttgtcatctgcgatgcccaccggcgtaatgccgagattgtgaacggcatccaagaatgaaagctcaagcacaaccacccgcttaggtgtgccgcttactgtcgtttttccttcttcgtcatggatcactctggaatccttagactcgcttttgccgcttccgttgttattctggcttgatgaacagccggatacaatgaggcaggcgagcaataaaacactcatgatggcaatcaacttgttagaataggtgcgcatgtcattcttccttttttcagatttagtaatgagaatcattatcacatgtaacactataatagcatggcttatcatgtcaatatttttttagtaaagaaagctgcgtttttactgctttctcatgaaagcatcatcagacacaaataagtggtatgcagcgttaccgtgtcttcgagacaaaaacgcatgggcgttggctttagaggtttcgaacatatcagcagtgacataaggaaggagagtgctgagataaccggacaatttcttttctatttcatctgttagtgcaaattcaatgtcgccgatattcatgataatcgagaaaacaaagtcgatatcgatatgaaaatgttcctcggcaaaaaccgcaagctcgtgaattcctggtgaacatccggcacgcttatggaaaatctgtttgactaaatcactcacaatccaagcattgtattgctgttctggtgaaaagtattgcattagacatacctcctgctcgtacggataaaggcagcgtttcatggtcgtgtgctccgtgcagcggcttctccttaattttgatttttctgaaaataggtcccgttcctatcactttaccatggacggaaaacaaatagctactaccattcctcctgtttttctcttcaatgttctggaatctgtttcaggtacagacgatcgggtatgaaagaaatatagaaaacatgaaggaggaatatcgacatgaaaccagttgtaaaagagtatacaaatgacgaacagctcatgaaagatgtagaggaattgcagaaaatgggtgttgcgaaagaggatgtatacgtcttagctcacgacgatgacagaacggaacgcctggctgacaacacgaacgccaacacgatcggagccaaagaaacaggtttcaagcacgcggtgggaaatatcttcaataaaaaaggagacgagctccgcaataaaattcacgaaatcggtttttctgaagatgaagccgctcaatttgaaaaacgcttagatgaaggaaaagtgcttctctttgtgacagataacgaaaaagtgaaagcttgggcataaagcaaggaaaaaaccaaaaggccaatgtcggccttttggtttttttgcggtctttgcggtgggattttgcagaatgccgcaataggatagcggaacattttcggttctgaatgtccctcaatttgctattatatttttgtgataaattggaataaaatctcacaaaatagaaaatgggggtacatagtggatgaaaaaagtgatgttagctacggctttgtttttaggattgactccagctggcgcgaacgcagctgatttaggccaccagacgttgggatccaatgatggctggggcgcgtactcgaccggcacgacaggcggatcaaaagcatcctcctcaaatgtgtataccgtcagcaacagaaaccagcttgtctcggcattagggaaggaaacgaacacaacgccaaaaatcatttatatcaagggaacgattgacatgaacgtggatgacaatctgaagccgcttggcctaaatgactataaagatccggagtatgatttggacaaatatttgaaagcctatgatcctagcacatggggcaaaaaagagccgtcgggaacacaagaagaagcgagagcacgctctcagaaaaaccaaaaagcacgggtcatggtggatatccctgcaaacacgacgatcgtcggttcagggactaacgctaaagtcgtgggaggaaacttccaaatcaagagtgataacgtcattattcgcaacattgaattccaggatgcctatgactattttccgcaatggttgtaaaacgacggccagtgaattctgatcaaatggttcagtgagagcgaagcgaacacttgattttttaattttctatcttttataggtcattagagtatacttatttgtcctataaactatttagcagcataatagatttattgaataggtcatttaagttgagcatattagaggaggaaaatcttggagaaatatttgaagaacccgaggatctagatcaggtaccgcaacgttcgcagatgctgctgaagagattattaaaaagctgaaagcaaaaggctatcaattggtaactgtatctcagcttgaagaagtgaagaagcagagaggctattgaataaatgagtagaaagcgccatatcggcgcttttcttttggaagaaaatatagggaaaatggtacttgttaaaaattcggaatatttatacaatatcatatgtatcacattgaaaggaggggcctgctgtccagactgtccgctgtgtaaaaaaaaggaataaaggggggttgacattattttactgatatgtataatataatttgtataagaaaatggaggggccctcgaaacgtaagatgaaaccttagataaaagtgctttttttgttgcaattgaagaattattaatgttaagcttaattaaagataatatctttgaattgtaacgcccctcaaaagtaagaactacaaaaaaagaatacgttatatagaaatatgtttgaaccttcttcagattacaaatatattcggacggactctacctcaaatgcttatctaactatagaatgacatacaagcacaaccttgaaaatttgaaaatataactaccaatgaacttgttcatgtgaattatcgctgtatttaattttctcaattcaatatataatatgccaatacattgttacaagtagaaattaagacacccttgatagccttactatacctaacatgatgtagtattaaatgaatatgtaaatatatttatgataagaagcgacttatttataatcattacatatttttctattggaatgattaagattccaatagaatagtgtataaattatttatcttgaaaggagggatgcctaaaaacgaagaacattaaaaacatatatttgcaccgtctaatggatagaaaggaggtgatccagccgcaccttatgaaaaatcattttatcagtttgaaaattatgtattatggagctcagaggaggagagtgagtaatgaaacaacaaaaacggctttacgcccgattgctgacgctgttatttgcgctcatcttcttgctgcctcattctgcagcagcggcgagcagttccgcaagcgtcaaaggggacgtgatttaccagattatcattgaccggttttacgatggggacacgacgaacaacaatcctgccaaaagttatggactttacgatccgaccaaatcgaagtggaaaatgtattggggcggggatctggagggggttcgtcaaaaacttccttatcttaaacagctgggcgtaacgacaatctggttgtccccggttttggacaatctggatacactggcgggcaccgataacacgggctatcacggatactggacgcgcgattttaaacagattgaggaacatttcgggaattggaccacatttgacacgttggtcaatgatgctcaccaaaacggaatcaaggtgattgtcgactttgtgcccaatcattcgactccttttaaggcaaacgattccacctttgcggaaggcggcgccctctacaacaatggaacctatatgggcaattattttgatgacgcaacaaaagggtacttccaccataatggggacatcagcaactgggacgaccggtacgaggcgcaatggaaaaacttcacggatccagccggtttctcgcttgccgatttgtcgcaggaaaatggcacgattgctcaatacctgaccgatgcggcggttcaattggtagcacatggagcggatggtttgcggattgatgcggtgaagcattttaattcggggttctccaaaagcttggccgataaactgtaccaaaagaaagacattttcctggtgggggaatggtacggagatgaccccggaacagccaatcatctggaaaaggtccggtacgccaacaacagcggtgtcaatgtgctggattttgatctcaacacggtgattcgaaatgtgttcggcacatttacgcaaacgatgtacgatcttaacaatatggtgaaccaaacggggaacgagtacaaatacaaagaaaatctaatcacatttatcgataaccatgatatgtcaagatttctttcggtaaattcgaacaaggcgaatttgcaccaggcgcttgctttcattctcacttcgcggggtacgccctccatctattatggaaccgaacaatacatggcaggcggcaatgacccgtacaaccgggggatgatgccggcgtttgatacgacaaccaccgcctttaaagaggtgtcaactctggcggggttgcgcaggaacaatgcggcgatccagtacggcaccaccacccagcgttggatcaacaatgatgtttacatttatgaacggaaatttttcaacgatgtcgtgttggtggccatcaatcgaaacacgcaatcctcctattcgatttccggtttgcagacggccttgccaaatggcagctatgcggattatctgtcagggctgttgggggggaacgggatttccgtttccaatggaagtgtcgcttcgttcacgcttgcgcctggagccgtgtctgtttggcagtacagcacatccgcttcagcgccgcaaatcggatcggttgctccaaatatggggattccgggtaatgtggtcacgatcgacgggaaaggttttgggacgacgcagggaaccgtgacatttggcggagtgacagcgactgtgaaatcctggacatccaatcggattgaagtgtacgttcccaacatggccgccgggctgaccgatgtgaaagtcaccgcgggtggagtttccagcaatctgtattcttacaatattttgagtggaacgcagacatcggttgtgtttactgtgaaaagtgcgcctccgaccaacctgggggataagatttacctgacgggcaacataccggaattggggaattggagcacggatacgagcggagccgttaacaatgcgcaagggcccctgctcgcgcccaattatccggattggttttatgtattcagcgttccagcaggaaagacgattcaattcaagttcttcatcaagcgtgcggatggaacgattcaatgggagaatggttcgaaccacgtggccacaactcccacgggtgcaaccggtaacattactgttacgtggcaaaactagtcgcatgttcaatccgctccataatcggtcgacgcggcggttcgcgtccggacagcacatcaccgaaatatttcgacggcccagccggctagcgcgttaatccgcggatatatagcggccgcagatctggtgggatatttttaaaatatatatttatgttacagtaatattgacttttaaaaaaggattgattctaatgaagaaagcagacaagtaagcctcctaaattcactttagataaaaatttaggaggcatatcaaatgaactttaataaaattgatttagacaattggaagagaaaagagatatttaatcattatttgaaccaacaaacgacttttagtataaccacagaaattgatattagtgttttataccgaaacataaaacaagaaggatataaattttaccctgcatttattttcttagtgacaagggtgataaactcaaatacagcttttagaactggttacaatagcgacggagagttaggttattgggataagttagagccactttatacaatttttgatggtgtatctaaaacattctctggtatttggactcctgtaaagaatgacttcaaagagttttatgatttatacctttctgatgtagagaaatataatggttcggggaaattgtttcccaaaacacctatacctgaaaatgctttttctctttctattattccatggacttcatttactgggtttaacttaaatatcaataataatagtaattaccttctacccattattacagcaggaaaattcattaataaaggtaattcaatatatttaccgctatctttacaggtacatcattctgtttgtgatggttatcatgcaggattgtttatgaactctattcaggaattgtcagataggcctaatgactggcttttatatgagataatgccgactgtactttttacagtcggttttctaacgatacattaataggtacgaaaaagcaactttttttgcgcttaaaaccagtcataccaataacttaagggtaactagcctcgccggaaagagcgaaaatgcctcacatttgtgccacctaaaaaggagcgatttacatatgagttatgcagtttgtagaatgcaaaaagtgaaatcagctggactaaaaggggccgcagagtagaatggaaaaggggatcggaaaacaagtatataggaggagacctatttatggcttcagaaaaagacgcaggaaaacagtcagcagtaaagcttgttccattgcttattactgtcgctgtgggactaatcatctggtttattcccgctccgtccggacttgaacctaaagcttggcatttgtttgcgatttttgtcgcaacaattatcggctttatctccaagcccttgccaatgggtgcaattgcaatttttgcattggcggttactgcactaactggaacactatcaattgaggatacattaagcggattcgggaataagaccatttggcttatcgttatcgcattctttatttcccggggatttatcaaaaccggtctcggtgcgagaatttcgtatgtattcgttcagaaattcggaaaaaaaacccttggactttcttattcactgctattcagtgatttaatactttcacctgctattccaagtaatacggcgcgtgcaggaggcattatatttcctattatcagatcattatccgaaacattcggatcaagcccggcaaatggaacagagagaaaaatcggtgcattcttattaaaaaccggttttcaggggaatctgatcacatctgctatgttcctgacagcgatggcggcgaacccgctgattgccaagctggcccatgatgtcgcaggggtggacttaacatggacaagctgggcaattgccgcgattgtaccgggacttgtaagcttaatcatcacgccgcttgtgatttacaaactgtatccgccggaaatcaaagaaacaccggatgcggcgaaaatcgcaacagaaaaactgaaagaaatgggaccgttcaaaaaatcggagctttccatggttatcgtgtttcttttggtgcttgtgctgtggatttttggcggcagcttcaacatcgacgctaccacaaccgcattgatcggtttggccgttctcttattatcacaagttctgacttgggatgatatcaagaaagaacagggcgcttgggatacgctcacttggtttgcggcgcttgtcatgctcgccaacttcttgaatgaattaggcatggtgtcttggttcagtaatgccatgaaatcatccgtatcagggttctcttggattgtggcattcatcattttaattgttgtgtattattactctcactatttctttgcaagtgcgacagcccacatcagtgcgatgtattcagcatttttggctgtcgtcgtggcagcgggcgcaccgccgcttttagcagcgctgagcctcgcgttcatcagcaacctgttcgggtcaacgactcactacggttctggagcggctccggtcttcttcggagcaggctacatcccgcaaggcaaatggtggtccatcggatttatcctgtcgattgttcatatcatcgtatggcttgtgatcggcggattatggtggaaagtactaggaatatggtagaaagaaaaaggcagacgcggtctgcctttttttattttcactccttcgtaagaaaatggattttgaaaaatgagaaaattccctgtgaaaaatggtatgatctaggtagaaaggacggctggtgctgtggtgaaaaagcggttccatttttccctgcaaacaaaaataatggggctgattgcggctctgctggtctttgtcattggtgtgctgaccattacgttagccgttcagcatacacagggagaacggagacaggcagagcagctggcggttcaaacggcgagaaccatttcctatatgccgccggttaaagagctcattgagagaaaagacggacatgcggctcagacgcaagaggtcattgaacaaatgaaagaacagactggtgcgtttgccatttatgttttgaacgaaaaaggagacattcgcagcgcctctggaaaaagcggattaaagaaactggagcgcagcagagaaattttgtttggcggttcgcatgtttctgaaacaaaagcggatggacgaagagtgatcagagggagcgcgccgattataaaagaacagaagggatacagccaagtgatcggcagcgtgtctgttgattttctgcaaacggagacagagcaaagcatcaaaaagcatttgagaaatttgagtgtgattgctgtgcttgtactgctgctcggatttattggcgccgccgtgctggcgaaaagcatcagaaaggatacgctcgggcttgaaccgcatgagatcgcggctctatatcgtgagaggaacgcaatgcttttcgcgattcgagaagggattattgccaccaatcgtgaaggcgtcgtcaccatgatgaacgtatcggcggccgagatgctgaagctgcccgagcctgtgatccatcttcctatagatgacgtcatgccgggagcagggctgatgtctgtgcttgaaaaaggagaaatgctgccgaaccaggaagtaagcgtcaacgatcaagtgtttattatcaatacgaaagtgatgaatcaaggcgggcaggcgtatgggattgtcgtcagcttcagggagaaaacagagctgaagaagctgatcgacacattgacagaggttcgcaaatattcagaggatctcagggcgcagactcatgaattttcaaataagctttatgcgattttagggctgcttgagcttggggagtatgatgaagccattgatctgattaaagaggaatatgcgatacaaaatgaacagcatgatcttttattccataacatccattcgcagcaggtgcaggccattttgttagggaaaataagcaaggcatcggaaaagaaggtcaagctggtgattgatgagaacagctcactcgcgcctcttcctgcgcatatcggcttgtcccatcttattacgattattggcaatttaattgataacgctttcgaagctgtagcggagcaaagcgtgaaggaagttttgttttttatcacggatatgggccatgacattgtcattgaagtatcagacacagggcccggtgtgccgccagagaaaatagaagctgtgtttgagagaggctattcttcaaaggggatgaggagaggctacggtctggccaatgtgaaagactcagtgcgtgaactgggcggctggatcgaactggcgaatcaaaaaactggcggggcggtattcactgtatttataccgaaggagaaacaaagggggaatccatttgattcacatcgcgattgcggaggatgattttcgagttgcgcaaatccatgagagattgattaaacagcttgatggattcaagattatcggcaaggcggctaacgcaaaagagacattggcgcttttgaaggaacacaaggctgatttgcttctgctggatatttatatgccggacgagcttgggaccgcgttgattcctgatatacgaagccgatttcctgaagtggacattatgattatcacagcggcaacagaaacccgtcatttgcaggaagcgctaagggcgggaattgcccactatttgatcaaacccgtaacagctgacaagttcaggcaggtgctgcttcagtataaagaaaaaaggaagctgctcatgtctcagccggaggtcagccaatccatgatcgaccatatttttgggaacggtgtgaagacagctttgccggcagaggatttgccgactggcattaattcgattacactgcgaaaaattaaggaagcgcttcagactgcgtcagaaggattgacagcggaggaacttggggaaaaaatgggggcgtcacgaacaactgcccgccgttatgccgagtaccttgtgtcaaaggaagaagcaagagccgagcttgaatacgggattatcggcaggccggagagaaaatattatttggcggcggattagatatgaaaaaatctataatcctattgaatattctattgatctttatgcagggtgatatcaggcaggcggctgcgccgcgcctgccggacgggccgatagaaattgtcgtccctgccgaaccttctggcggctgggatgtcacagcgcaggcgatccaatcagttttgaggcagaagcagatcgtgaaggatgatgttcatatcgtctataaatccggcggcgggggagagaaaggctggaaatatgtcaacaaaagcagcaaacaaaccatcagcatgacgtccagcctaatattgagcaatgatcttctcgggcaaagcaaattaaaaatgtccgattttacg

SEQ ID NO: 91 - DNA, 14472 bp, Nocardiopsis sp.
  source 1..14472: mol_type = genomic DNA
tggaagtctttataatgaacccattacttctttaaagtcctggagagaaaatttattaaaagctcatgctgataaagaattaaatcatttaacaagtgatatttttgaacaaaatggtgaaagtccctatggagtatgcggtatgatcggcggaacatgggagtggactagaagtgagcttaaaacaaagagagctttccaccctatttttgagaatgtaccatttaatagtgttaactcatttgccgttcttaaaggaggatcattcttctctcatccaggcttaatgttcccttcttttagagcaaaagatattcctttctgtcgacacaatgaaatggggattagatgcgtaaagaatattccagtatataaaattagagaatcaattaatgggccaattactaataaagcaatttattaatcattctaggttagagacttgataaaagtatactaacattgtgtagtaatgttcagcttgtagaaaaaacaatgttttttctacaagattttattttaaatgcttttcaaaattatcagggattgagaatcagaaaaagagccattaagctcgatcttagctaggtattacgatcttctgtatattattgtgagaaatatagaagattcagttagttagcatttcgattttaagctgagcctgcaatagcaaagcatctgttttgattattctttttctgatacataagctaattttgtcgcttttcttttttgtcttttcacgcatttcgaggatgacttactataattctttcagcttttctatgtgttaagattcgaatagatgaaataactttaacaagttggtcaataagaacagatttaactttatgttaaaagagtatctcgtatagaacataagaagaatgacgagttttttaagattatcatcaattatgtgagaataaaatattataagggaaaatgaaggctgtcacgtttctcgacagccctagggaattcctctccttttcatttcgcccgtaatttcgggcacagtcccgtcggcaggcacattggcttctggtcgatcgggcttctcatgatgcagcattccaagccgaagacttcacggaaaaatggctgggtgaacacatcttccggtgttccggcgttgtatatttttccgtccagcacactgatcagatagtcagcatattgagcggcttggtttaaatcatggagcaccatgacaacggtgcggccatggtcgcggttcagctttttcagcagttcaagcacttcaatctgatgtgagatgtctaaatacgtggtcggctcatcaagcaaaagcaaatcagtgccttgcgcaagtgccatggaaatccaggctctttgtctttggccgcctgagagggcatcaagtgtccgatccttcagttcaatcatgcccgttgcttccagcgcccactctaccatgtcatgatcctcttgggtatgcttggataacagctttttgtgaggatgtctgccaaaatagcataattcctctaccgtcaatccttcaggagcctgaggagattgtggaagaatggccagtttttttgcgacttcttttgatggctggcggtggatgtcttttccttctagtagcactgtaccgctttttggggccatcagcctggcgagcgatttgaggattgttgatttaccgcagccattagcgccgatgagcgcagtgatttttccttcttctatctttaagtcgactccgtcaataatcactgtactgtcatatgaaagagtgagctggtctgcagccagttttcccatggtatcctctccctactgtttcctcgcttcgaatttcaataaatataagaaataaggcgcgccgatcacggctgtcagtattccggcaggtatttcaaccggaggcatgatgccgcgccctaacgtatctgcaattaataatataatagcaccaatcaatgccgatgcaggcagtaaatatttagctttttctccggtaagccgtctggcgatatgcggagcaagcaagccgataaaaccgattgagccgacgacggctacacagcttcccgccagcgccaccgcggtgaaaatcaggatgaatctcagccggtttgcgttttctccgagaccctgtgcaagctcatccccgagtgacataagatccagcttcggtatgagtatgcagacgatcggaaaaagaatcaaaagccatggcgcaagcagcttgacttcttcccagtttcttccccagaggcttcctgtcagccaaatgagtgcagcattcacgtcgcctggaaacttgaccatcatatattgcattccggcgtggcagaccgcgcctaaagcaatgcctgataaagccagtgaagagggctgaatgctcttttttcgggctatcattaataatagtacagcaataatggcggctccggcaaatgcggagaacggaagcacgtataccggcgactcaggaaagatgagaatcacagccatcgccgcaagtccggagccttttgaaatgccgacaacgtccggggaagcgagcggatttcggatcacaccctgtaaaatcgctccggcagcggcaagtccagcacctgccaaaatcgctaatataatgcggggaaggcgatattgctggatgataaattcaaaggaatgatccagtcccagcagattcgtcactaccgcatcaggtgaaatgtataatgcaccgattccaatgctgatgacggacagaacgattaaaatcacggccaatatgagtatcgccagtaaggggcgtttttgttttctggttgttttcttcatttcaggtttcgccctttccttgccaaatataagaaaaacggcgttccgataatcgcggtgacaatgccgaccggtgattcataaggaaatgcaatccatctggccagaacatctgcgtacaccagcaaaatggcaccgaacagtgccgaaaacggaagcacgtattgataatgttctccgatcagcttgcggacaatatgcgggacgagcagcccgacaaagccaatcggcccggcgacggctacggaagcgccggaaagaattaaaataatcaaactgatcagaatcctgatgccgttcatattttgtccaagcccttttgctgtttcgtctccgagaccgagaacagaaacagaaccggaaaatacgagggcaagcccgatgccaatgacagaaaaaggagcgatggttatgacgtcctgccagttgctgccgtcgattgcgcctgtcatccagtacagaacatcctcacctgactcatttaaaataatgatggcctgtgtcatagaggagaggaacaagtgcacggccattcctgacagcgccagcttgacaggcgtcattccgccggatgaggcaatcatatacacaatcgcgccgcctgctgccgcacccgcaaaagcgaatataacagatgaatagggcgatgccggcagaatgacgagagaagcaacaacaaaaagcgatgcacccgcattcacaccgaaaatttggggtgaagccagaggatttctggtcatagcctgcatcagcgcccctgctacagctaggctggcgccgacaaaaacgccgattaatgtgcggggaaggcgaagagtagagatgatgagctgttcctttgaaccgtcccatacaaaaagatatttcaatgaatctatgatgctgatgtctgaggctcctactgaaagattcagcccaagcccaaatataaaaataatcagtgcaatgataaacatcatcagtcttgatgatgagcgccgtttggctgaatgatacaacagtctcacttccttactgcgtctggttgcaaaaacgaagaagcaaggattcccctcgcttctcatttgtcctatttattatacacttttttaagcacatctttggcgcttgtttcactagacttgatgcctctgaatcttgtccaagtgtcacggtccgcatcatagacttgtccatttttcaccgctttgagatttttccagagcgggttcgttttccactcatctacaatggttttgccttcgttggctgagatgaacaaaatatcaggatcgattttgctcaattgctcaaggctgacctcttgataggcgttatctgacttcacagcgtgtgtaaagcctagcattttaaagatttctccgtcataggatgatgatgtatgaagctggaaggaatccgctcttgcaacgccgagaacgatgttgcggttttcatctttcggaagttcggcttttagatcgttgatgacttttttgtgctcggcaagcttttcttttccttcatcttctttatttaatgctttagcaatggtcgtaaagctgtcgatcgtttcgtcatatgtcgcttcacggctttttaattcaatcgtcggggcgatttttttcagctgtttataaatgtttttatggcgctcagcgtcagcgatgattaaatcaggcttcaaggaactgatgacctcaagattgggttcgctgcgtgtgcctacagatgtgtaatcaatggagctgccgacaagctttttaatcatatcttttttgttgtcatctgcgatgcccaccggcgtaatgccgagattgtgaacggcatccaagaatgaaagctcaagcacaaccacccgcttaggtgtgccgcttactgtcgtttttccttcttcgtcatggatcactctggaatccttagactcgcttttgccgcttccgttgttattctggcttgatgaacagccggatacaatgaggcaggcgagcaataaaacactcatgatggcaatcaacttgttagaataggtgcgcatgtcattcttccttttttcagatttagtaatgagaatcattatcacatgtaacactataatagcatggcttatcatgtcaatatttttttagtaaagaaagctgcgtttttactgctttctcatgaaagcatcatcagacacaaataagtggtatgcagcgttaccgtgtcttcgagacaaaaacgcatgggcgttggctttagaggtttcgaacatatcagcagtgacataaggaaggagagtgctgagataaccggacaatttcttttctatttcatctgttagtgcaaattcaatgtcgccgatattcatgataatcgagaaaacaaagtcgatatcgatatgaaaatgttcctcggcaaaaaccgcaagctcgtgaattcctggtgaacatccggcacgcttatggaaaatctgtttgactaaatcactcacaatccaagcattgtattgctgttctggtgaaaagtattgcattagacatacctcctgctcgtacggataaaggcagcgtttcatggtcgtgtgctccgtgcagcggcttctccttaattttgatttttctgaaaataggtcccgttcctatcactttaccatggacggaaaacaaatagctactaccattcctcctgtttttctcttcaatgttctggaatctgtttcaggtacagacgatcgggtatgaaagaaatatagaaaacatgaaggaggaatatcgacatgaaaccagttgtaaaagagtatacaaatgacgaacagctcatgaaagatgtagaggaattgcagaaaatgggtgttgcgaaagaggatgtatacgtcttagctcacgacgatgacagaacggaacgcctggctgacaacacgaacgccaacacgatcggagccaaagaaacaggtttcaagcacgcggtgggaaatatcttcaataaaaaaggagacgagctccgcaataaaattcacgaaatcggtttttctgaagatgaagccgctcaatttgaaaaacgcttagatgaaggaaaagtgcttctctttgtgacagataacgaaaaagtgaaagcttgggcataaagcaaggaaaaaaccaaaaggccaatgtcggccttttggtttttttgcggtctttgcggtgggattttgcagaatgccgcaataggatagcggaacattttcggttctgaatgtccctcaatttgctattatatttttgtgataaattggaataaaatctcacaaaatagaaaatgggggtacatagtggatgaaaaaagtgatgttagctacggctttgtttttaggattgactccagctggcgcgaacgcagctgatttaggccaccagacgttgggatccaatgatggctggggcgcgtactcgaccggcacgacaggcggatcaaaagcatcctcctcaaatgtgtataccgtcagcaacagaaaccagcttgtctcggcattagggaaggaaacgaacacaacgccaaaaatcatttatatcaagggaacgattgacatgaacgtggatgacaatctgaagccgcttggcctaaatgactataaagatccggagtatgatttggacaaatatttgaaagcctatgatcctagcacatggggcaaaaaagagccgtcgggaacacaagaagaagcgagagcacgctctcagaaaaaccaaaaagcacgggtcatggtggatatccctgcaaacacgacgatcgtcggttcagggactaacgctaaagtcgtgggaggaaacttccaaatcaagagtgataacgtcattattcgcaacattgaattccaggatgcctatgactattttccgcaatggttgtaaaacgacggccagtgaattctgatcaaatggttcagtgagagcgaagcgaacacttgattttttaattttctatcttttataggtcattagagtatacttatttgtcctataaactatttagcagcataatagatttattgaataggtcatttaagttgagcatattagaggaggaaaatcttggagaaatatttgaagaacccgaggatctagatcaggtaccgcaacgttcgcagatgctgctgaagagattattaaaaagctgaaagcaaaaggctatcaattggtaactgtatctcagcttgaagaagtgaagaagcagagaggctattgaataaatgagtagaaagcgccatatcggcgcttttcttttggaagaaaatatagggaaaatggtacttgttaaaaattcggaatatttatacaatatcatatgtatcacattgaaaggaggggcctgctgtccagactgtccgctgtgtaaaaaaaaggaataaaggggggttgacattattttactgatatgtataatataatttgtataagaaaatggaggggccctcgaaacgtaagatgaaaccttagataaaagtgctttttttgttgcaattgaagaattattaatgttaagcttaattaaagataatatctttgaattgtaacgcccctcaaaagtaagaactacaaaaaaagaatacgttatatagaaatatgtttgaaccttcttcagattacaaatatattcggacggactctacctcaaatgcttatctaactatagaatgacatacaagcacaaccttgaaaatttgaaaatataactaccaatgaacttgttcatgtgaattatcgctgtatttaattttctcaattcaatatataatatgccaatacattgttacaagtagaaattaagacacccttgatagccttactatacctaacatgatgtagtattaaatgaatatgtaaatatatttatgataagaagcgacttatttataatcattacatatttttctattggaatgattaagattccaatagaatagtgtataaattatttatcttgaaaggagggatgcctaaaaacgaagaacattaaaaacatatatttgcaccgtctaatggatttatgaaaaatcattttatcagtttgaaaattatgtattatggagctctgaaaaaaaggagaggataaagaatgaaaaaaccgctgggaaaaattgtcgcaagcacagcacttcttatttcagtggcatttagctcatctattgcatcagcagctacaggagcattaccgcagtctccgacaccggaagcagatgcagtctcaatgcaagaagcactgcaaagagatcttgatcttacatcagcagaagcagaagaacttcttgctgcacaagatacagcatttgaagtggatgaagcagcggcagaagcagcaggagatgcatatggcggctcagtttttgatacagaatcacttgaacttacggttcttgttacagatgcagcagcagttgaagcagttgaagcaacaggagcaggaacagaacttgtttcatatggaattgatggccttgatgaaattgttcaagaactgaatgcagctgatgctgttccgggcgttgttggctggtatccggatgttgctggagatacagttgtccttgaagttcttgaaggatcaggcgcagatgtttcaggcctgctggcagatgcaggagtcgatgcatcagcagttgaagttacaacatcagatcaaccggaactttatgcagatattattggcggcctggcatatacaatgggcggcagatgcagcgttggctttgcagcaacaaatgcagcaggccaaccgggctttgttacagcaggccattgcggcagagttggcacacaggttacaattggcaatggcagaggcgtttttgaacaaagcgtttttccgggcaatgatgcagcatttgttagaggcacatcaaattttacacttacaaatctggtttcaagatataatacaggcggctatgcaacagttgcaggccataatcaagcaccgattggctcatcagtttgcagatcaggctcaacaacaggctggcattgcggcacaattcaagcaagaggccaaagcgttagctatccggaaggcacagttacaaatatgacaagaacaacagtttgtgcagaaccgggcgattcaggcggctcatatattagcggcacacaagcacaaggcgttacatcaggcggctcaggcaattgcagaacaggcggcacaacattttaccaagaagttacaccgatggttaattcatggggcgttagacttagaacataatcgcatgttcaatccgctccataaccgatcgacgcggcggttcgcgtccggacagcacatcaccgaaatatttcgacggcccagccggctagcgcgttaatccgcggatatatagcggccgcagatctgggaccaataataatgactagagaagaaagaatgaagattgttcatgaaattaaggaacgaatattggataaagtgggatatttttaaaatatatatttatgttacagtaatattgacttttaaaaaaggattgattctaatgaagaaagcagacaagtaagcctcctaaattcactttagataaaaatttaggaggcatatcaaatgaactttaataaaattgatttagacaattggaagagaaaagagatatttaatcattatttgaaccaacaaacgacttttagtataaccacagaaattgatattagtgttttataccgaaacataaaacaagaaggatataaattttaccctgcatttattttcttagtgacaagggtgataaactcaaatacagcttttagaactggttacaatagcgacggagagttaggttattgggataagttagagccactttatacaatttttgatggtgtatctaaaacattctctggtatttggactcctgtaaagaatgacttcaaagagttttatgatttatacctttctgatgtagagaaatataatggttcggggaaattgtttcccaaaacacctatacctgaaaatgctttttctctttctattattccatggacttcatttactgggtttaacttaaatatcaataataatagtaattaccttctacccattattacagcaggaaaattcattaataaaggtaattcaatatatttaccgctatctttacaggtacatcattctgtttgtgatggttatcatgcaggattgtttatgaactctattcaggaattgtcagataggcctaatgactggcttttatatgagataatgccgactgtactttttacagtcggttttctaacgatacattaataggtacgaaaaagcaactttttttgcgcttaaaaccagtcataccaataacttaagggtaactagcctcgccggaaagagcgaaaatgcctcacatttgtgccacctaaaaaggagcgatttacatatgagttatgcagtttgtagaatgcaaaaagtgaaatcagctggactaaaaggggccgcagagtagaatggaaaaggggatcggaaaacaagtatataggaggagacctatttatggcttcagaaaaagacgcaggaaaacagtcagcagtaaagcttgttccattgcttattactgtcgctgtgggactaatcatctggtttattcccgctccgtccggacttgaacctaaagcttggcatttgtttgcgatttttgtcgcaacaattatcggctttatctccaagcccttgccaatgggtgcaattgcaatttttgcattggcggttactgcactaactggaacactatcaattgaggatacattaagcggattcgggaataagaccatttggcttatcgttatcgcattctttatttcccggggatttatcaaaaccggtctcggtgcgagaatttcgtatgtattcgttcagaaattcggaaaaaaaacccttggactttcttattcactgctattcagtgatttaatactttcacctgctattccaagtaatacggcgcgtgcaggaggcattatatttcctattatcagatcattatccgaaacattcggatcaagcccggcaaatggaacagagagaaaaatcggtgcattcttattaaaaaccggttttcaggggaatctgatcacatctgctatgttcctgacagcgatggcggcgaacccgctgattgccaagctggcccatgatgtcgcaggggtggacttaacatggacaagctgggcaattgccgcgattgtaccgggacttgtaagcttaatcatcacgccgcttgtgatttacaaactgtatccgccggaaatcaaagaaacaccggatgcggcgaaaatcgcaacagaaaaactgaaagaaatgggaccgttcaaaaaatcggagctttccatggttatcgtgtttcttttggtgcttgtgctgtggatttttggcggcagcttcaacatcgacgctaccacaaccgcattgatcggtttggccgttctcttattatcacaagttctgacttgggatgatatcaagaaagaacagggcgcttgggatacgctcacttggtttgcggcgcttgtcatgctcgccaacttcttgaatgaattaggcatggtgtcttggttcagtaatgccatgaaatcatccgtatcagggttctcttggattgtggcattcatcattttaattgttgtgtattattactctcactatttctttgcaagtgcgacagcccacatcagtgcgatgtattcagcatttttggctgtcgtcgtggcagcgggcgcaccgccgcttttagcagcgctgagcctcgcgttcatcagcaacctgttcgggtcaacgactcactacggttctggagcggctccggtcttcttcggagcaggctacatcccgcaaggcaaatggtggtccatcggatttatcctgtcgattgttcatatcatcgtatggcttgtgatcggcggattatggtggaaagtactaggaatatggtagaaagaaaaaggcagacgcggtctgcctttttttattttcactccttcgtaagaaaatggattttgaaaaatgagaaaattccctgtgaaaaatggtatgatctaggtagaaaggacggctggtgctgtggtgaaaaagcggttccatttttccctgcaaacaaaaataatggggctgattgcggctctgctggtctttgtcattggtgtgctgaccattacgttagccgttcagcatacacagggagaacggagacaggcagagcagctggcggttcaaacggcgagaaccatttcctatatgccgccggttaaagagctcattgagagaaaagacggacatgcggctcagacgcaagaggtcattgaacaaatgaaagaacagactggtgcgtttgccatttatgttttgaacgaaaaaggagacattcgcagcgcctctggaaaaagcggattaaagaaactggagcgcagcagagaaattttgtttggcggttcgcatgtttctgaaacaaaagcggatggacgaagagtgatcagagggagcgcgccgattataaaagaacagaagggatacagccaagtgatcggcagcgtgtctgttgattttctgcaaacggagacagagcaaagcatcaaaaagcatttgagaaatttgagtgtgattgctgtgcttgtactgctgctcggatttattggcgccgccgtgctggcgaaaagcatcagaaaggatacgctcgggcttgaaccgcatgagatcgcggctctatatcgtgagaggaacgcaatgcttttcgcgattcgagaagggattattgccaccaatcgtgaaggcgtcgtcaccatgatgaacgtatcggcggccgagatgctgaagctgcccgagcctgtgatccatcttcctatagatgacgtcatgccgggagcagggctgatgtctgtgcttgaaaaaggagaaatgctgccgaaccaggaagtaagcgtcaacgatcaagtgtttattatcaatacgaaagtgatgaatcaaggcgggcaggcgtatgggattgtcgtcagcttcagggagaaaacagagctgaagaagctgatcgacacattgacagaggttcgcaaatattcagaggatctcagggcgcagactcatgaattttcaaataagctttatgcgattttagggctgcttgagcttggggagtatgatgaagccattgatctgattaaagaggaatatgcgatacaaaatgaacagcatgatcttttattccataacatccattcgcagcaggtgcaggccattttgttagggaaaataagcaaggcatcggaaaagaaggtcaagctggtgattgatgagaacagctcactcgcgcctcttcctgcgcatatcggcttgtcccatcttattacgattattggcaatttaattgataacgctttcgaagctgtagcggagcaaagcgtgaaggaagttttgttttttatcacggatatgggccatgacattgtcattgaagtatcagacacagggcccggtgtgccgccagagaaaatagaagctgtgtttgagagaggctattcttcaaaggggatgaggagaggctacggtctggccaatgtgaaagactcagtgcgtgaactgggcggctggatcgaactggcgaatcaaaaaactggcggggcggtattcactgtatttataccgaaggagaaacaaagggggaatccatttgattcacatcgcgattgcggaggatgattttcgagttgcgcaaatccatgagagattgattaaacagcttgatggattcaagattatcggcaaggcggctaacgcaaaagagacattggcgcttttgaaggaacacaaggctgatttgcttctgctggatatttatatgccggacgagcttgggaccgcgttgattcctgatatacgaagccgatttcctgaagtggacattatgattatcacagcggcaacagaaacccgtcatttgcaggaagcgctaagggcgggaattgcccactatttgatcaaacccgtaacagctgacaagttcaggcaggtgctgcttcagtataaagaaaaaaggaagctgctcatgtctcagccggaggtcagccaatccatgatcgaccatatttttgggaacggtgtgaagacagctttgccggcagaggatttgccgactggcattaattcgattacactgcgaaaaattaaggaagcgcttcagactgcgtcagaaggattgacagcggaggaacttggggaaaaaatgggggcgtcacgaacaactgcccgccgttatgccgagtaccttgtgtcaaaggaagaagcaagagccgagcttgaatacgggattatcggcaggccggagagaaaatattatttggcggcggattagatatgaaaaaatctataatcctattgaatattctattgatctttatgcagggtgatatcaggcaggcggctgcgccgcgcctgccggacgggccgatagaaattgtcgtccctgccgaaccttctggcggctgggatgtcacagcgcaggcgatccaatcagttttgaggcagaagcagatcgtgaaggatgatgttcatatcgtctataaatccggcggcgggggagagaaaggctggaaatatgtcaacaaaagcagcaaacaaaccatcagcatgacgtccagcctaatattgagcaatgatcttctcgggcaaagcaaattaaaaatgtccgattttacg

SEQ ID NO: 92 - DNA, 1448 bp, Bacillus licheniformis
  source 1..1448: mol_type = genomic DNA
tcgacggcttcccgtgcgcctccgggatcgctgtgataattgacaaccacattcatcttttcttttccaaaccgttctgcaaccgccttgcctataccttttgaagagccggtcacaattgctgtttttccttttaaatcactatacaacctaaacacccctcaatttcttttctccatgtacattacccggtatcaatatatgatcaaacaaaatgttaatacacacctttagtatgatcttttttaaacatatggaaaattcagaattattttgttaatatctaacttgtacttacaacaaaataaggaagtgatatgatttggttagtaaaaagagtgttaaacgaggtttgatcacaggtctcattggtatttctatttattctttaggtatgcacccggcccaagccgcgccatcgcctcatactcctgtttcaagcgatccttcatacaaagcggaaacatcggttacttatgacccaaacattaagagcgatcaatacggcttgtattcaaaagcgtttacaggcaccggcaaagtgaatgaaacaaaggaaaaagcggaaaaaaagtcacccgccaaagctccttacagcattaaatcggtgattggttctgatgatcggacaagggtcaccaacacaaccgcatatccgtacagagcgatcgttcatatttcaagcagcatcggttcatgcaccggatggatgatcggtccgaaaaccgtcgcaacagccggacactgcatctatgacacatcaagcggttcatttgccggtacagccactgtttcgccgggacggaacgggacaagctatccttacggctcagttaaatcgacgcgctactttattccgtcaggatggagaagcggaaacaccaattacgattacggcgcaatcgaactaagcgaaccgatcggcaatactgtcggatacttcggatactcgtacactacttcatcacttgttgggacaactgttaccatcagcggctacccaggcgataaaacagcaggcacacaatggcagcattcaggaccgattgccatctccgaaacgtataaattgcagtacgcaatggacacgtacggaggacaaagcggttcaccggtattcgaacaaagcagctccagaacgaactgcagcggtccgtgctcgcttgccgtacacacaaatggagtatacggcggctcctcgtacaacagaggcacccggattacaaaagaggtgttcgacaatttgaccaactggaaaaacagcgcacaataatacacgaagacagcccgcttccttttggaacgggctgtcacatctaacggccgtatacttaatttcctttaagcctgtactttttgccatctattgatatcgtgaaatttgaaggaccgctgatcggcaaataatagacaagctgaaactccgcttcctcaccaggtttgaatgg

SEQ ID NO: 93 - DNA, 14463 bp, Bacillus sp.
  source 1..14463: mol_type = genomic DNA
tggaagtctttataatgaacccattacttctttaaagtcctggagagaaaatttattaaaagctcatgctgataaagaattaaatcatttaacaagtgatatttttgaacaaaatggtgaaagtccctatggagtatgcggtatgatcggcggaacatgggagtggactagaagtgagcttaaaacaaagagagctttccaccctatttttgagaatgtaccatttaatagtgttaactcatttgccgttcttaaaggaggatcattcttctctcatccaggcttaatgttcccttcttttagagcaaaagatattcctttctgtcgacacaatgaaatggggattagatgcgtaaagaatattccagtatataaaattagagaatcaattaatgggccaattactaataaagcaatttattaatcattctaggttagagacttgataaaagtatactaacattgtgtagtaatgttcagcttgtagaaaaaacaatgttttttctacaagattttattttaaatgcttttcaaaattatcagggattgagaatcagaaaaagagccattaagctcgatcttagctaggtattacgatcttctgtatattattgtgagaaatatagaagattcagttagttagcatttcgattttaagctgagcctgcaatagcaaagcatctgttttgattattctttttctgatacataagctaattttgtcgcttttcttttttgtcttttcacgcatttcgaggatgacttactataattctttcagcttttctatgtgttaagattcgaatagatgaaataactttaacaagttggtcaataagaacagatttaactttatgttaaaagagtatctcgtatagaacataagaagaatgacgagttttttaagattatcatcaattatgtgagaataaaatattataagggaaaatgaaggctgtcacgtttctcgacagccctagggaattcctctccttttcatttcgcccgtaatttcgggcacagtcccgtcggcaggcacattggcttctggtcgatcgggcttctcatgatgcagcattccaagccgaagacttcacggaaaaatggctgggtgaacacatcttccggtgttccggcgttgtatatttttccgtccagcacactgatcagatagtcagcatattgagcggcttggtttaaatcatggagcaccatgacaacggtgcggccatggtcgcggttcagctttttcagcagttcaagcacttcaatctgatgtgagatgtctaaatacgtggtcggctcatcaagcaaaagcaaatcagtgccttgcgcaagtgccatggaaatccaggctctttgtctttggccgcctgagagggcatcaagtgtccgatccttcagttcaatcatgcccgttgcttccagcgcccactctaccatgtcatgatcctcttgggtatgcttggataacagctttttgtgaggatgtctgccaaaatagcataattcctctaccgtcaatccttcaggagcctgaggagattgtggaagaatggccagtttttttgcgacttcttttgatggctggcggtggatgtcttttccttctagtagcactgtaccgctttttggggccatcagcctggcgagcgatttgaggattgttgatttaccgcagccattagcgccgatgagcgcagtgatttttccttcttctatctttaagtcgactccgtcaataatcactgtactgtcatatgaaagagtgagctggtctgcagccagttttcccatggtatcctctccctactgtttcctcgcttcgaatttcaataaatataagaaataaggcgcgccgatcacggctgtcagtattccggcaggtatttcaaccggaggcatgatgccgcgccctaacgtatctgcaattaataatataatagcaccaatcaatgccgatgcaggcagtaaatatttagctttttctccggtaagccgtctggcgatatgcggagcaagcaagccgataaaaccgattgagccgacgacggctacacagcttcccgccagcgccaccgcggtgaaaatcaggatgaatctcagccggtttgcgttttctccgagaccctgtgcaagctcatccccgagtgacataagatccagcttcggtatgagtatgcagacgatcggaaaaagaatcaaaagccatggcgcaagcagcttgacttcttcccagtttcttccccagaggcttcctgtcagccaaatgagtgcagcattcacgtcgcctggaaacttgaccatcatatattgcattccggcgtggcagaccgcgcctaaagcaatgcctgataaagccagtgaagagggctgaatgctcttttttcgggctatcattaataatagtacagcaataatggcggctccggcaaatgcggagaacggaagcacgtataccggcgactcaggaaagatgagaatcacagccatcgccgcaagtccggagccttttgaaatgccgacaacgtccggggaagcgagcggatttcggatcacaccctgtaaaatcgctccggcagcggcaagtccagcacctgccaaaatcgctaatataatgcggggaaggcgatattgctggatgataaattcaaaggaatgatccagtcccagcagattcgtcactaccgcatcaggtgaaatgtataatgcaccgattccaatgctgatgacggacagaacgattaaaatcacggccaatatgagtatcgccagtaaggggcgtttttgttttctggttgttttcttcatttcaggtttcgccctttccttgccaaatataagaaaaacggcgttccgataatcgcggtgacaatgccgaccggtgattcataaggaaatgcaatccatctggccagaacatctgcgtacaccagcaaaatggcaccgaacagtgccgaaaacggaagcacgtattgataatgttctccgatcagcttgcggacaatatgcgggacgagcagcccgacaaagccaatcggcccggcgacggctacggaagcgccggaaagaattaaaataatcaaactgatcagaatcctgatgccgttcatattttgtccaagcccttttgctgtttcgtctccgagaccgagaacagaaacagaaccggaaaatacgagggcaagcccgatgccaatgacagaaaaaggagcgatggttatgacgtcctgccagttgctgccgtcgattgcgcctgtcatccagtacagaacatcctcacctgactcatttaaaataatgatggcctgtgtcatagaggagaggaacaagtgcacggccattcctgacagcgccagcttgacaggcgtcattccgccggatgaggcaatcatatacacaatcgcgccgcctgctgccgcacccgcaaaagcgaatataacagatgaatagggcgatgccggcagaatgacgagagaagcaacaacaaaaagcgatgcacccgcattcacaccgaaaatttggggtgaagccagaggatttctggtcatagcctgcatcagcgcccctgctacagctaggctggcgccgacaaaaacgccgattaatgtgcggggaaggcgaagagtagagatgatgagctgttcctttgaaccgtcccatacaaaaagatatttcaatgaatctatgatgctgatgtctgaggctcctactgaaagattcagcccaagcccaaatataaaaataatcagtgcaatgataaacatcatcagtcttgatgatgagcgccgtttggctgaatgatacaacagtctcacttccttactgcgtctggttgcaaaaacgaagaagcaaggattcccctcgcttctcatttgtcctatttattatacacttttttaagcacatctttggcgcttgtttcactagacttgatgcctctgaatcttgtccaagtgtcacggtccgcatcatagacttgtccatttttcaccgctttgagatttttccagagcgggttcgttttccactcatctacaatggttttgccttcgttggctgagatgaacaaaatatcaggatcgattttgctcaattgctcaaggctgacctcttgataggcgttatctgacttcacagcgtgtgtaaagcctagcattttaaagatttctccgtcataggatgatgatgtatgaagctggaaggaatccgctcttgcaacgccgagaacgatgttgcggttttcatctttcggaagttcggcttttagatcgttgatgacttttttgtgctcggcaagcttttcttttccttcatcttctttatttaatgctttagcaatggtcgtaaagctgtcgatcgtttcgtcatatgtcgcttcacggctttttaattcaatcgtcggggcgatttttttcagctgtttataaatgtttttatggcgctcagcgtcagcgatgattaaatcaggcttcaaggaactgatgacctcaagattgggttcgctgcgtgtgcctacagatgtgtaatcaatggagctgccgacaagctttttaatcatatcttttttgttgtcatctgcgatgcccaccggcgtaatgccgagattgtgaacggcatccaagaatgaaagctcaagcacaaccacccgcttaggtgtgccgcttactgtcgtttttccttcttcgtcatggatcactctggaatccttagactcgcttttgccgcttccgttgttattctggcttgatgaacagccggatacaatgaggcaggcgagcaataaaacactcatgatggcaatcaacttgttagaataggtgcgcatgtcattcttccttttttcagatttagtaatgagaatcattatcacatgtaacactataatagcatggcttatcatgtcaatatttttttagtaaagaaagctgcgtttttactgctttctcatgaaagcatcatcagacacaaataagtggtatgcagcgttaccgtgtcttcgagacaaaaacgcatgggcgttggctttagaggtttcgaacatatcagcagtgacataaggaaggagagtgctgagataaccggacaatttcttttctatttcatctgttagtgcaaattcaatgtcgccgatattcatgataatcgagaaaacaaagtcgatatcgatatgaaaatgttcctcggcaaaaaccgcaagctcgtgaattcctggtgaacatccggcacgcttatggaaaatctgtttgactaaatcactcacaatccaagcattgtattgctgttctggtgaaaagtattgcattagacatacctcctgctcgtacggataaaggcagcgtttcatggtcgtgtgctccgtgcagcggcttctccttaattttgatttttctgaaaataggtcccgttcctatcactttaccatggacggaaaacaaatagctactaccattcctcctgtttttctcttcaatgttctggaatctgtttcaggtacagacgatcgggtatgaaagaaatatagaaaacatgaaggaggaatatcgacatgaaaccagttgtaaaagagtatacaaatgacgaacagctcatgaaagatgtagaggaattgcagaaaatgggtgttgcgaaagaggatgtatacgtcttagctcacgacgatgacagaacggaacgcctggctgacaacacgaacgccaacacgatcggagccaaagaaacaggtttcaagcacgcggtgggaaatatcttcaataaaaaaggagacgagctccgcaataaaattcacgaaatcggtttttctgaagatgaagccgctcaatttgaaaaacgcttagatgaaggaaaagtgcttctctttgtgacagataacgaaaaagtgaaagcttgggcataaagcaaggaaaaaaccaaaaggccaatgtcggccttttggtttttttgcggtctttgcggtgggattttgcagaatgccgcaataggatagcggaacattttcggttctgaatgtccctcaatttgctattatatttttgtgataaattggaataaaatctcacaaaatagaaaatgggggtacatagtggatgaaaaaagtgatgttagctacggctttgtttttaggattgactccagctggcgcgaacgcagctgatttaggccaccagacgttgggatccaatgatggctggggcgcgtactcgaccggcacgacaggcggatcaaaagcatcctcctcaaatgtgtataccgtcagcaacagaaaccagcttgtctcggcattagggaaggaaacgaacacaacgccaaaaatcatttatatcaagggaacgattgacatgaacgtggatgacaatctgaagccgcttggcctaaatgactataaagatccggagtatgatttggacaaatatttgaaagcctatgatcctagcacatggggcaaaaaagagccgtcgggaacacaagaagaagcgagagcacgctctcagaaaaaccaaaaagcacgggtcatggtggatatccctgcaaacacgacgatcgtcggttcagggactaacgctaaagtcgtgggaggaaacttccaaatcaagagtgataacgtcattattcgcaacattgaattccaggatgcctatgactattttccgcaatggttgtaaaacgacggccagtgaattctgatcaaatggttcagtgagagcgaagcgaacacttgattttttaattttctatcttttataggtcattagagtatacttatttgtcctataaactatttagcagcataatagatttattgaataggtcatttaagttgagcatattagaggaggaaaatcttggagaaatatttgaagaacccgaggatctagatcaggtaccgcaacgttcgcagatgctgctgaagagattattaaaaagctgaaagcaaaaggctatcaattggtaactgtatctcagcttgaagaagtgaagaagcagagaggctattgaataaatgagtagaaagcgccatatcggcgcttttcttttggaagaaaatatagggaaaatggtacttgttaaaaattcggaatatttatacaatatcatatgtatcacattgaaaggaggggcctgctgtccagactgtccgctgtgtaaaaaaaaggaataaaggggggttgacattattttactgatatgtataatataatttgtataagaaaatggaggggccctcgaaacgtaagatgaaaccttagataaaagtgctttttttgttgcaattgaagaattattaatgttaagcttaattaaagataatatctttgaattgtaacgcccctcaaaagtaagaactacaaaaaaagaatacgttatatagaaatatgtttgaaccttcttcagattacaaatatattcggacggactctacctcaaatgcttatctaactatagaatgacatacaagcacaaccttgaaaatttgaaaatataactaccaatgaacttgttcatgtgaattatcgctgtatttaattttctcaattcaatatataatatgccaatacattgttacaagtagaaattaagacacccttgatagccttactatacctaacatgatgtagtattaaatgaatatgtaaatatatttatgataagaagcgacttatttataatcattacatatttttctattggaatgattaagattccaatagaatagtgtataaattatttatcttgaaaggagggatgcctaaaaacgaagaacattaaaaacatatatttgcaccgtctaatggatttatgaaaaatcattttatcagtttgaaaattatgtattatggagctctgaaaaaaaggagaggataaagaatgaaaaaaccgctgggaaaaattgtcgcaagcacagcacttcttatttcagtggcatttagctcatctattgcatcagcagctcaaccggcgaaaaatgttgaaaaggattatattgtcggatttaagtcaggagtgaaaaccgcatctgtcaaaaaggacatcatcaaagagagcggcggaaaagtggacaagcagtttagaatcatcaacgcggcaaaagcgaagctagacaaagaagcgcttaaggaagtcaaaaatgatccggatgtcgcttatgtggaagaggatcatgtggcccatgccttggcgcaaaccgttccttacggcattcctctcattaaagcggacaaagtgcaggctcaaggctttaagggagcgaatgtaaaagtagccgtcctggatacaggaatccaagcttctcatccggacttgaacgtagtcggcggagcaagctttgtggctggcgaagcttataacaccgacggcaacggacacggcacacatgttgccggtacagtagctgcgcttgacaatacaacgggtgtattaggcgttgcgccaagcgtatccttgtacgcggttaaagtactgaattcaagcggaagcggatcatacagcggcattgtaagcggaatcgagtgggcgacaacaaacggcatggatgttatcaatatgagccttgggggagcatcaggctcgacagcgatgaaacaggcagtcgacaatgcatatgcaagaggggttgtcgttgtagctgcagcagggaacagcggatcttcaggaaacacgaatacaattggctatcctgcgaaatacgattctgtcatcgctgttggtgcggtagactctaacagcaacagagcttcattttccagcgtcggagcagagcttgaagtcatggctcctggcgcaggcgtatacagcacttacccaacgaacacttatgcaacattgaacggaacgtcaatggcttctcctcatgtagcgggagcagcagctttgatcttgtcaaaacatccgaacctttcagcttcacaagtccgcaaccgtctctccagcacggcgacttatttgggaagctccttctactatgggaaaggtctgatcaatgtcgaagctgccgctcaataatcgcatgttcaatccgctccataatcggtcgacgcggcggttcgcgtccggacagcacatcaccgaaatatttcgacggcccagccggctagcgcgttaatccgcggatatatagcggccgcagatctgggaccaataataatgactagagaagaaagaatgaagattgttcatgaaattaaggaacgaatattggataaagtgggatatttttaaaatatatatttatgttacagtaatattgacttttaaaaaaggattgattctaatgaagaaagcagacaagtaagcctcctaaattcactttagataaaaatttaggaggcatatcaaatgaactttaataaaattgatttagacaattggaagagaaaagagatatttaatcattatttgaaccaacaaacgacttttagtataaccacagaaattgatattagtgttttataccgaaacataaaacaagaaggatataaattttaccctgcatttattttcttagtgacaagggtgataaactcaaatacagcttttagaactggttacaatagcgacggagagttaggttattgggataagttagagccactttatacaatttttgatggtgtatctaaaacattctctggtatttggactcctgtaaagaatgacttcaaagagttttatgatttatacctttctgatgtagagaaatataatggttcggggaaattgtttcccaaaacacctatacctgaaaatgctttttctctttctattattccatggacttcatttactgggtttaacttaaatatcaataataatagtaattaccttctacccattattacagcaggaaaattcattaataaaggtaattcaatatatttaccgctatctttacaggtacatcattctgtttgtgatggttatcatgcaggattgtttatgaactctattcaggaattgtcagataggcctaatgactggcttttatatgagataatgccgactgtactttttacagtcggttttctaacgatacattaataggtacgaaaaagcaactttttttgcgcttaaaaccagtcataccaataacttaagggtaactagcctcgccggaaagagcgaaaatgcctcacatttgtgccacctaaaaaggagcgatttacatatgagttatgcagtttgtagaatgcaaaaagtgaaatcagctggactaaaaggggccgcagagtagaatggaaaaggggatcggaaaacaagtatataggaggagacctatttatggcttcagaaaaagacgcaggaaaacagtcagcagtaaagcttgttccattgcttattactgtcgctgtgggactaatcatctggtttattcccgctccgtccggacttgaacctaaagcttggcatttgtttgcgatttttgtcgcaacaattatcggctttatctccaagcccttgccaatgggtgcaattgcaatttttgcattggcggttactgcactaactggaacactatcaattgaggatacattaagcggattcgggaataagaccatttggcttatcgttatcgcattctttatttcccggggatttatcaaaaccggtctcggtgcgagaatttcgtatgtattcgttcagaaattcggaaaaaaaacccttggactttcttattcactgctattcagtgatttaatactttcacctgctattccaagtaatacggcgcgtgcaggaggcattatatttcctattatcagatcattatccgaaacattcggatcaagcccggcaaatggaacagagagaaaaatcggtgcattcttattaaaaaccggttttcaggggaatctgatcacatctgctatgttcctgacagcgatggcggcgaacccgctgattgccaagctggcccatgatgtcgcaggggtggacttaacatggacaagctgggcaattgccgcgattgtaccgggacttgtaagcttaatcatcacgccgcttgtgatttacaaactgtatccgccggaaatcaaagaaacaccggatgcggcgaaaatcgcaacagaaaaactgaaagaaatgggaccgttcaaaaaatcggagctttccatggttatcgtgtttcttttggtgcttgtgctgtggatttttggcggcagcttcaacatcgacgctaccacaaccgcattgatcggtttggccgttctcttattatcacaagttctgacttgggatgatatcaagaaagaacagggcgcttgggatacgctcacttggtttgcggcgcttgtcatgctcgccaacttcttgaatgaattaggcatggtgtcttggttcagtaatgccatgaaatcatccgtatcagggttctcttggattgtggcattcatcattttaattgttgtgtattattactctcactatttctttgcaagtgcgacagcccacatcagtgcgatgtattcagcatttttggctgtcgtcgtggcagcgggcgcaccgccgcttttagcagcgctgagcctcgcgttcatcagcaacctgttcgggtcaacgactcactacggttctggagcggctccggtcttcttcggagcaggctacatcccgcaaggcaaatggtggtccatcggatttatcctgtcgattgttcatatcatcgtatggcttgtgatcggcggattatggtggaaagtactaggaatatggtagaaagaaaaaggcagacgcggtctgcctttttttattttcactccttcgtaagaaaatggattttgaaaaatgagaaaattccctgtgaaaaatggtatgatctaggtagaaaggacggctggtgctgtggtgaaaaagcggttccatttttccctgcaaacaaaaataatggggctgattgcggctctgctggtctttgtcattggtgtgctgaccattacgttagccgttcagcatacacagggagaacggagacaggcagagcagctggcggttcaaacggcgagaaccatttcctatatgccgccggttaaagagctcattgagagaaaagacggacatgcggctcagacgcaagaggtcattgaacaaatgaaagaacagactggtgcgtttgccatttatgttttgaacgaaaaaggagacattcgcagcgcctctggaaaaagcggattaaagaaactggagcgcagcagagaaattttgtttggcggttcgcatgtttctgaaacaaaagcggatggacgaagagtgatcagagggagcgcgccgattataaaagaacagaagggatacagccaagtgatcggcagcgtgtctgttgattttctgcaaacggagacagagcaaagcatcaaaaagcatttgagaaatttgagtgtgattgctgtgcttgtactgctgctcggatttattggcgccgccgtgctggcgaaaagcatcagaaaggatacgctcgggcttgaaccgcatgagatcgcggctctatatcgtgagaggaacgcaatgcttttcgcgattcgagaagggattattgccaccaatcgtgaaggcgtcgtcaccatgatgaacgtatcggcggccgagatgctgaagctgcccgagcctgtgatccatcttcctatagatgacgtcatgccgggagcagggctgatgtctgtgcttgaaaaaggagaaatgctgccgaaccaggaagtaagcgtcaacgatcaagtgtttattatcaatacgaaagtgatgaatcaaggcgggcaggcgtatgggattgtcgtcagcttcagggagaaaacagagctgaagaagctgatcgacacattgacagaggttcgcaaatattcagaggatctcagggcgcagactcatgaattttcaaataagctttatgcgattttagggctgcttgagcttggggagtatgatgaagccattgatctgattaaagaggaatatgcgatacaaaatgaacagcatgatcttttattccataacatccattcgcagcaggtgcaggccattttgttagggaaaataagcaaggcatcggaaaagaaggtcaagctggtgattgatgagaacagctcactcgcgcctcttcctgcgcatatcggcttgtcccatcttattacgattattggcaatttaattgataacgctttcgaagctgtagcggagcaaagcgtgaaggaagttttgttttttatcacggatatgggccatgacattgtcattgaagtatcagacacagggcccggtgtgccgccagagaaaatagaagctgtgtttgagagaggctattcttcaaaggggatgaggagaggctacggtctggccaatgtgaaagactcagtgcgtgaactgggcggctggatcgaactggcgaatcaaaaaactggcggggcggtattcactgtatttataccgaaggagaaacaaagggggaatccatttgattcacatcgcgattgcggaggatgattttcgagttgcgcaaatccatgagagattgattaaacagcttgatggattcaagattatcggcaaggcggctaacgcaaaagagacattggcgcttttgaaggaacacaaggctgatttgcttctgctggatatttatatgccggacgagcttgggaccgcgttgattcctgatatacgaagccgatttcctgaagtggacattatgattatcacagcggcaacagaaacccgtcatttgcaggaagcgctaagggcgggaattgcccactatttgatcaaacccgtaacagctgacaagttcaggcaggtgctgcttcagtataaagaaaaaaggaagctgctcatgtctcagccggaggtcagccaatccatgatcgaccatatttttgggaacggtgtgaagacagctttgccggcagaggatttgccgactggcattaattcgattacactgcgaaaaattaaggaagcgcttcagactgcgtcagaaggattgacagcggaggaacttggggaaaaaatgggggcgtcacgaacaactgcccgccgttatgccgagtaccttgtgtcaaaggaagaagcaagagccgagcttgaatacgggattatcggcaggccggagagaaaatattatttggcggcggattagatatgaaaaaatctataatcctattgaatattctattgatctttatgcagggtgatatcaggcaggcggctgcgccgcgcctgccggacgggccgatagaaattgtcgtccctgccgaaccttctggcggctgggatgtcacagcgcaggcgatccaatcagttttgaggcagaagcagatcgtgaaggatgatgttcatatcgtctataaatccggcggcgggggagagaaaggctggaaatatgtcaacaaaagcagcaaacaaaccatcagcatgacgtccagcctaatattgagcaatgatcttctcgggcaaagcaaattaaaaatgtccgattttacg

SEQ ID NO: 94 - DNA, 5025 bp, Lederbergia lenta
  source 1..5025: mol_type = genomic DNA
aagggcgaattcgcggccgctaaattcaattcgccctatagtgagtcgtattacaattcactggccgtcgttttacaacgtcgtgactgggaaaaccctggcgttacccaacttaatcgccttgcagcacatccccctttcgccagctggcgtaatagcgaagaggcccgcaccgatcgcccttcccaacagttgcgcagcctatacgtacggcagtttaaggtttacacctataaaagagagagccgttatcgtctgtttgtggatgtacagagtgatattattgacacgccggggcgacggatggtgatccccctggccagtgcacgtctgctgtcagataaagtctcccgtgaactttacccggtggtgcatatcggggatgaaagctggcgcatgatgaccaccgatatggccagtgtgccggtctccgttatcggggaagaagtggctgatctcagccaccgcgaaaatgacatcaaaaacgccattaacctgatgttctggggaatataaatgtcaggcatgagattatcaaaaaggatcttcacctagatccttttcacgtagaaagccagtccgcagaaacggtgctgaccccggatgaatgtcagctactgggctatctggacaagggaaaacgcaagcgcaaagagaaagcaggtagcttgcagtgggcttacatggcgatagctagactgggcggttttatggacagcaagcgaaccggaattgccagctggggcgccctctggtaaggttgggaagccctgcaaagtaaactggatggctttctcgccgccaaggatctgatggcgcaggggatcaagctctgatcaagagacaggatgaggatcgtttcgcatgattgaacaagatggattgcacgcaggttctccggccgcttgggtggagaggctattcggctatgactgggcacaacagacaatcggctgctctgatgccgccgtgttccggctgtcagcgcaggggcgcccggttctttttgtcaagaccgacctgtccggtgccctgaatgaactgcaagacgaggcagcgcggctatcgtggctggccacgacgggcgttccttgcgcagctgtgctcgacgttgtcactgaagcgggaagggactggctgctattgggcgaagtgccggggcaggatctcctgtcatctcaccttgctcctgccgagaaagtatccatcatggctgatgcaatgcggcggctgcatacgcttgatccggctacctgcccattcgaccaccaagcgaaacatcgcatcgagcgagcacgtactcggatggaagccggtcttgtcgatcaggatgatctggacgaagagcatcaggggctcgcgccagccgaactgttcgccaggctcaaggcgagcatgcccgacggcgaggatctcgtcgtgacccatggcgatgcctgcttgccgaatatcatggtggaaaatggccgcttttctggattcatcgactgtggccggctgggtgtggcggaccgctatcaggacatagcgttggctacccgtgatattgctgaagagcttggcggcgaatgggctgaccgcttcctcgtgctttacggtatcgccgctcccgattcgcagcgcatcgccttctatcgccttcttgacgagttcttctgaattattaacgcttacaatttcctgatgcggtattttctccttacgcatctgtgcggtatttcacaccgcatacaggtggcacttttcggggaaatgtgcgcggaacccctatttgtttatttttctaaatacattcaaatatgtatccgctcatgagacaataaccctgataaatgcttcaataatattgaaaaaggaagagtatgagtattcaacatttccgtgtcgcccttattcccttttttgcggcattttgccttcctgtttttgctcacccagaaacgctggtgaaagtaaaagatgctgaagatcagttgggtgcacgagtgggttacatcgaactggatctcaacagcggtaagatccttgagagttttcgccccgaagaacgttttccaatgatgagcacttttaaagttctgctatgtggcgcggtattatcccgtattgacgccgggcaagagcaactcggtcgccgcatacactattctcagaatgacttggttgagtactcaccagtcacagaaaagcatcttacggatggcatgacagtaagagaattatgcagtgctgccataaccatgagtgataacactgcggccaacttacttctgacaacgatcggaggaccgaaggagctaaccgcttttttgcacaacatgggggatcatgtaactcgccttgatcgttgggaaccggagctgaatgaagccataccaaacgacgagcgtgacaccacgatgcctgtagcaatggcaacaacgttgcgcaaactattaactggcgaactacttactctagcttcccggcaacaattaatagactggatggaggcggataaagttgcaggaccacttctgcgctcggcccttccggctggctggtttattgctgataaatctggagccggtgagcgtgggtctcgcggtatcattgcagcactggggccagatggtaagccctcccgtatcgtagttatctacacgacggggagtcaggcaactatggatgaacgaaatagacagatcgctgagataggtgcctcactgattaagcattggtaactgtcagaccaagtttactcatatatactttagattgatttaaaacttcatttttaatttaaaaggatctaggtgaagatcctttttgataatctcatgaccaaaatcccttaacgtgagttttcgttccactgagcgtcagaccccgtagaaaagatcaaaggatcttcttgagatcctttttttctgcgcgtaatctgctgcttgcaaacaaaaaaaccaccgctaccagcggtggtttgtttgccggatcaagagctaccaactctttttccgaaggtaactggcttcagcagagcgcagataccaaatactgtccttctagtgtagccgtagttaggccaccacttcaagaactctgtagcaccgcctacatacctcgctctgctaatcctgttaccagtggctgctgccagtggcgataagtcgtgtcttaccgggttggactcaagacgatagttaccggataaggcgcagcggtcgggctgaacggggggttcgtgcacacagcccagcttggagcgaacgacctacaccgaactgagatacctacagcgtgagctatgagaaagcgccacgcttcccgaagggagaaaggcggacaggtatccggtaagcggcagggtcggaacaggagagcgcacgagggagcttccagggggaaacgcctggtatctttatagtcctgtcgggtttcgccacctctgacttgagcgtcgatttttgtgatgctcgtcaggggggcggagcctatggaaaaacgccagcaacgcggcctttttacggttcctgggcttttgctggccttttgctcacatgttctttcctgcgttatcccctgattctgtggataaccgtattaccgcctttgagtgagctgataccgctcgccgcagccgaacgaccgagcgcagcgagtcagtgagcgaggaagcggaagagcgcccaatacgcaaaccgcctctccccgcgcgttggccgattcattaatgcagctggcacgacaggtttcccgactggaaagcgggcagtgagcgcaacgcaattaatgtgagttagctcactcattaggcaccccaggctttacactttatgcttccggctcgtatgttgtgtggaattgtgagcggataacaatttcacacaggaaacagctatgaccatgattacgccaagctcagaattaaccctcactaaagggactagtcctgcaggtttaaacgaattcgcccttgctgctgaagaagcaaaagaaaaatatttaattggctttaatgagcaggaagctgtcagtgagtttgtagaacaagtagaggcaaatttacaggtcgccattctctctgaggaagaggaagtcgaaattgaattgcttcatgaatttgaaacgattcctgttttatccgttgagttaagcccagaagatgtggacgcgcttgaactcgatccagcgatttcttatattgaagaggatgcagaagtaacgacaatggcgcaatcggtaccatggggaattagccgtgtgcaagccccagctgcccataaccgtggattgacaggttctggtgtaaaagttgctgtcctcgatacagggatatccactcatccagatctaaatattcgtggtggcgcaagctttgtaccaggggaaccgtcgactcaagatgggaatgggcatggcacgcatgtggccgggacgatcgctgctttaaacaattcgattggcgttcttggcgtagctcctagcgctgagctatacgctgttaaagtcctaggggcgagcggttcaggttcggtcagctcgattgcccaaggattggaatgggcagggaacaatggcatgcacgttgctaatttgagtttaggaagcccttcgccaagtgccacactcgagcaagctgttaatagcgcgacttctagaggcgttcttgttgtagcggcatctgggaattcaggtgcaggctcaatcagctatccggcgcgctatgcgaacgcaatggcagtcggagctactgatcaaaacaacaaccgcgctagcttttcacagtatggcgcaggccttgacattgtcgcacccggggtaaacgtgcagagcacatacccaggttcaacatatgccagcttaaacggtacatcgagcgctactcctcatgttgcaggtgcggccgcccttgttaaacaaaagaacccatcttggtctaatgtacaaattcgaaatcatctaaagaatacggcaactagtttaggaagcacgaacttgtatggaagcggacttgttaacgcagaagcggcaacgcgttaatcg

SEQ ID NO: 95 - DNA, 9152 bp, Alkalihalobacillus clausii
  source 1..9152: mol_type = genomic DNA
gagctcgttattaatctgttcagcaatcgggcgcgattgctgaataaaagatacgagagacctctcttgtatcttttttattttgagtggttttgtccgttacactagaaaaccgaaagacaataaaaattttattcttgctgagtctggctttcggtaagctagacaaaacggacaaaataaaaattggcaagggtttaaaggtggagattttttgagtgatcttctcaaaaaatactacctgtcccttgctgatttttaaacgagcacgagagcaaaacccccctttgctgaggtggcagagggcaggtttttttgtttcttttttctcgtaaaaaaaagaaaggtcttaaaggttttatggttttggtcggcactgccgacagcctcgcagagcacacactttatgaatataaagtatagtgtgttatactttacttggaagtggttgccggaaagagcgaaaatgcctcacatttgtgccacctaaaaaggagcgatttacatatgagttatgcagtttgtagaatgcaaaaagtgaaatcagctggactaaaaggcagagctcggtaccagatccaatatctttgaattgtaacgcccctcaaaagtaagaactacaaaaaaagaatacgttatatagaaatatgtttgaaccttcttcagattacaaatatattcggacggactctacctcaaatgcttatctaactatagaatgacatacaagcacaaccttgaaaatttgaaaatataactaccaatgaacttgttcatgtgaattatcgctgtatttaattttctcaattcaatatataatatgccaatacattgttacaagtagaaattaagacacccttgatagccttactatacctaacatgatgtagtattaaatgaatatgtaaatatatttatgataagaagcgacttatttataatcattacatatttttctattggaatgattaagattccaatagaatagtgtataaattatttatcttgaaaggagggatgcctaaaaacgaagaacattaaaaacatatatttgcaccgtctaatggatagaaaggaggtgatccagccgcaccttatgaaaaatcattttatcagtttgaaaattatgtattatggagctcagaggaggagagtgagtaatgatgaggaaaaagagtttttggcttgggatgctgacggccttcatgctcgtgttcacgatggcattcagcgattccgcttctgctgctgaagaagcaaaagaaaaatatttaattggctttaatgagcaggaagctgtcagtgagtttgtagaacaagtagaggcaaatgacgaggtcgccattctctctgaggaagaggaagtcgaaattgaattgcttcatgaatttgaaacgattcctgttttatccgttgagttaagcccagaagatgtggacgcgcttgaactcgatccagcgatttcttatattgaagaggatgcagaagtaacgacaatggcgcaatcggtaccatggggaattagccgtgtgcaagccccagctgcccataaccgtggattgacaggttctggtgtaaaagttgctgtcctcgatacaggtatttccactcatccagacttaaatattcgtggtggcgctagctttgtaccaggggaaccatccactcaagatgggaatgggcatggcacgcatgtggccgggacgattgctgctttaaacaattcgattggcgttcttggcgtagcgccgagcgcggaactatacgctgttaaagtattaggggcgagcggttcaggttcggtcagctcgattgcccaaggattggaatgggcagggaacaatggcatgcacgttgctaatttgagtttaggaagcccttcgccaagtgccacacttgagcaagctgttaatagcgcgacttctagaggcgttcttgttgtagcggcatctgggaattcaggtgcaggctcaatcagctatccggcccgttatgcgaacgcaatggcagtcggagctactgaccaaaacaacaaccgcgccagcttttcacagtatggcgcagggcttgacattgtcgcaccaggtgtaaacgtgcagagcacatacccaggttcaacgtatgccagcttaaacggtacatcgagcgctactcctcatgttgcaggtgcagcagcccttgttaaacaaaagaacccatcttggtccaatgtacaaatccgcaatcatctaaagaatacggcaacgagcttaggaagcacgaacttgtatggaagcggacttgtcaatgcagaagcggcaacgcgataacgcgtagggcccgcggctagcggccgcgtcgactagaagagcagagaggacggatttcctgaaggaaatccgtttttttattttgcccgtcttataaatttcgttgtccaactcgcttaattgcgagtttttatttcgtttatttcaattaaggtaactaaagatcctctagagtcgattatgtcttttgcgcagtcggcttaaaccagttttcgctggtgcgaaaaaagagtgtcttgtgacacctaaattcaaaatctatcggtcagatttataccgatttgattttatatattcttgaataacatacgccgagttatcacataaaagcgggaaccaatcatcaaatttaaacttcattgcataatccattaaactcttaaattctacgattccttgttcatcaataaactcaatcatttctttaattaatttatatctatctgttgttgttttctttaataattcatcaacatctacaccgccataaactatcatatcttctttttgatatttaaatttattaggatcgtccatgtgaagcatatatctcacaagacctttcacacttcctgcaatctgcggaatagtcgcattcaattcttctgtaattatttttatctgttcataagatttattaccctcatacatcactagaatatgataatgctcttttttcatcctaccttctgtatcagtatccctatcatgtaatggagacactacaaattgaatgtgtaactcttttaaatactctaaccactcggcttttgctgattctggatataaaacaaatgtccaattacgtcctcttgaatttttcttgttttcagtttcttttattacattttcgctcatgatataataacggtgctaatacacttaacaaaatttagtcatagataggcagcatgccagtgctgtctatctttttttgtttaaaatgcaccgtattcctcctttgcatatttttttattagaataccggttgcatctgatttgctaatattatatttttctttgattctatttaatatctcattttcttctgttgtaagtcttaaagtaacagcaacttttttctcttcttttctatctacaaccatcactgtacctcccaacatctgtttttttcactttaacataaaaaacaaccttttaacattaaaaacccaatatttatttatttgtttggacaatggacaatggacacctaggggggaggtcgtagtacccccctatgttttctcccctaaataaccccaaaaatctaagaaaaaaagacctcaaaaaggtctttaattaacatctcaaatttcgcatttattccaatttcctttttgcgtgtgatgcgctgcgtccattaaaaatcctagagctttgaaaccgaaagttaatagctgtcgctactactttcgcttacgctctaagtatattttaaggactgtcacacgcaaaaagttttctcggcataaaagtacctctacatctctaaatcgtctgtacgctgtttctcacgctttctatcgaccttctggacattatcctgtacaacatccataaactgtcccacacgctcaaatttggaatcattaaagaatttctctttaagcctattaaaccctttctcaaacccagggaaattcgccctcgcagcacgatataaagtcactgtactagcttgaaatttctctgatacattcaactgctcattcaaactatcattctctcgctttaatttattaacctctttacttttttcgtgatacccctctttccatgtattcactacttctttcaaactctctctacgtttttttaattcttgattttctgtgtaatagtctgtgctcttaatattttcgtaatcatcaacaatccgttctgcagaagagattgtttcttgcaggcgttcaaattcatcagcagttaatatctttctaccagtctcttcacgtccagagaacaaacctgtacgctcattttcataatcaaagggtttcgtagacctcatatgctctattccactctgtaactgcttatttgccttctgtaactcatccttaacttcttgcagttcctgtttatgaaatacagtatctttcttgtactgatccatcgctttatgttctcgttctgtaacctctttggacgtgcctctttcaagttcataacctttctcattcacatactcattaaatctatcttgtaattgagtaaagtctttcttgttgcctaactgttcttttgcagacaatctcccgtcctctgttaaagggacaaaaccaaagtgcatatgtgggactctttcatccagatggacagtcgcatacagcatattttccttaccgtattcattttctagaaactccaagctatctttaaaaaatcgttctatttcttctccgcttaaatcatcaaagaaatctttatcacttgtaaccagtccgtccacatgtcgaattgcatctgaccgaattttacgtttccctgaataattctcatcaatcgtttcatcaattttatctttatactttatattttgtgcgttaatcaaatcataatttttatatgtttcctcatgatttatgtctttattattatagtttttattctctctttgattatgtctttgtatcccgtttgtattacttgatcctttaactctggcaaccctcaaaattgaatgagacatgctacacctccggataataaatatatataaacgtatatagatttcataaagtctaacacactagacttatttacttcgtaattaagtcgttaaaccgtgtgctctacgaccaaaactataaaacctttaagaactttctttttttacaagaaaaaagaaattagataaatctctcatatcttttattcaataatcgcatccgattgcagtataaatttaacgatcactcatcatgttcatatttatcagagctcgtgctataattatactaattttataaggaggaaaaaatatgggcatttttagtatttttgtaatcagcacagttcattatcaaccaaacaaaaaataagtggttataatgaatcgttaataagcaaaattcatataaccaaattaaagagggttataatgaacgagaaaaatataaaacacagtcaaaactttattacttcaaaacataatatagataaaataatgacaaatataagattaaatgaacatgataatatctttgaaatcggctcaggaaaaggccattttacccttgaattagtaaagaggtgtaatttcgtaactgccattgaaatagaccataaattatgcaaaactacagaaaataaacttgttgatcacgataatttccaagttttaaacaaggatatattgcagtttaaatttcctaaaaaccaatcctataaaatatatggtaatataccttataacataagtacggatataatacgcaaaattgtttttgatagtatagctaatgagatttatttaatcgtggaatacgggtttgctaaaagattattaaatacaaaacgctcattggcattacttttaatggcagaagttgatatttctatattaagtatggttccaagagaatattttcatcctaaacctaaagtgaatagctcacttatcagattaagtagaaaaaaatcaagaatatcacacaaagataaacaaaagtataattatttcgttatgaaatgggttaacaaagaatacaagaaaatatttacaaaaaatcaatttaacaattccttaaaacatgcaggaattgacgatttaaacaatattagctttgaacaattcttatctcttttcaatagctataaattatttaataagtaagttaagggatgcataaactgcatcccttaacttgtttttcgtgtgcctattttttgtgaatcgacctgcaggcatgcaagcttaagcgagttggaatttaaatatgatatctacattatcagcagtaacatcaacctttgatacaaggttgttgacgattttctttttattatcatatgatagttcattaatcggaattgagcccaactgagttttaactaactcaaaaacatcagtagagtcattaaatttattttcgctaatcttagctttaagcagctttttctcagcctgaagggaatcagtacgatctttcaactcatccatagtgataaaatcatttaggtacaaatcagagttcttttgtatttttttatcgatctgtgaaatttgctttttaaatgacgaagtatcaagaataggttggttgttgccattgataattttcaataaggagtcattattttcttgaaatccaatcaggttgtcaataacagtattttctaaattacttaaatcataagttcctgaatcacactttttattgtcattatatactgtaattccttttgtttttcgaggaaatctatttgcacagtgatatttcatagtgcggcttccatcttttcttttgtggccaagaacaatttttaaaggtgctccacagtaaccgcaccttgccatccctgacagcatatatttagcttggaaaggtctagggttgttatttctttcataagtctgctgttgtctttcttctagctctttttgaacttttaaataagtctcataagggataattggtttgtgcataccttcaaataggctgtccttaaatttgatataaccacagtaaactggattatcaagtgtttgtcttagggtacgataagaccacggtatatctttaccgatgtgtccagattcattgagtttatctcttaattttgtaagtgatattcctgataaataatcagtgaatatttgttcaactattgtagcttgtaaaggaacaatttctaatatacctgtctttctgttgtggtaatacccaaaagctgtcttagtccacatcatagacttaccagatttcgctcgccctagtttacccatagtcatgcgttcttttatattctctctttcaaactcattaattgcagaaagaatagtgagaaacaagctacccatagcagaagaagtatcaatactttcattaagcgagataaagtctattttattttttgtgaacacatccttaacaagataaagagtatctcttacactacgtgaaaggcggtctagcttatatacaagaactgtatcaaaagctttattctcgatatcgttgattaatctttgcattgctgggcgttcaagtttggcccctgaaaaaccagcatcagtataagtatcagatacttgccaccccattgcttcagcatattttgttaaacggtcaatttgctcatcaattgagaacccttcctctgcttggttagtagtggatactcgtgtatagattgctactttcttagtcatgagatttcccccttaaaaataaattcattcaaatacagatgcattttatttcatatagtaagtacatcacctattagtttgttgtttaaacaaactaacttattttcatcttatataacctcgtcagtattttcaatattttttttagttttttatgaacacattagatttaataaagggaagattcgctatgtactatgttgatacttaatttaaagattaaacaaatggagtggatgaagtggatatcgctgatcaaacctttgtcaaaaaagtaaatcaaaagttattattaaaagaaatccttaaaaattcacctatttcaagagcaaaattatctgaaatgactggattaaataaatcaactgtctcatcacaggtaaacacgttaatgaaagaaagtatggtatttgaaataggtcaaggacaatcaagtggcggaagaagacctgtcatgcttgtttttaataaaaaggcaggatactccgttggaatagatgttggtgtggattatattaatggcattttaacagaccttgaaggaacaatcgttcttgatcaataccgccatttggaatccaattctccagaaataacgaaagacattttgattgatatgattcatcactttattacgcaaatgccccaatctccgtacgggtttattggtataggtatttgcgtgcctggactcattgataaagatcaaaaaattgttttcactccgaactccaactggagagatattgacttaaaatcttcgatacaagagaagtacaatgtgtctgtttttattgaaaatgaggcaaatgctggcgcatatggagaaaaactatttggagctgcaaaaaatcacgataacattatttacgtaagtatcagcacaggaatagggatcggtgttattatcaacaatcatttatatagaggagtaagcggcttctctggagaaatgggacatatgacaatagactttaatggtcctaaatgcagttgcggaaaccgaggatgctgggaattgtatgcttcagagaaggctttattaaaatctcttcagaccaaagagaaaaaactgtcctatcaagatatcataaacctcgcccatctgaatgatatcggaaccttaaatgcattacaaaattttggattctatttaggaataggccttaccaatattctaaatactttcaacccacaagccgtaattttaagaaatagcataattgaatcgcatcctatggttttaaattcaatgagaagtgaagtatcatcaagggtttattcccaattaggcaatagctatgaattattgccatcttccttaggacagaatgcaccggcattaggaatgtcctccattgtgattgatcattttctggacatgattacaatgtaattttttatggaatggacagctcatctttaaagatgagtttttttattctaggagtatttctgaattc

SEQ ID NO: 96 - DNA, 807 bp, Alkalihalobacillus clausii
  source 1..807: mol_type = unassigned DNA
gctcaatctgttccttggggtatttctcgtgttcaagctcctgctgctcataatcgtggtttaactggttctggtgttaaagttgctgttttagatactggtatttctactcatcctgatttaaatattcgtggtggtgcttcttttgttcctggtgaaccttctactcaagatggtaatggtcatggtactcatgctgctggtactattgctgctttaaataattctattggtgttttaggtgttgctccttctgctgaattatatgctgttaaagttttaggtgcttctggttctggttctgtttctgctattgctcaaggtttagaatgggctggtaataatggtatgcatgttgctaatttatctttaggttctccttctccttctgctactttagaacaagctgttaattctgctacttctcgtggtgttttagttgttgctgcttctggtaattctggtgctggttctatttcttatcctgctcgttatgctaatgctatggctgttggtgctactgatcaaaataataatcgtgcttctttttctcaatatggtgctggtttagatattgttgctcctggtgttaatgttcaatctacttatcctggttctacttatgcttctttaaatggtacttctatggctactcctcatgttgctggtgctgctgctttagttaaacaaaaaaatccttcttggtctaatgttcaaattcgtaatcatttaaaaaatactgctacttctttaggttctactaatttatatggttctggtttagttaatgctgaagctgctactcgt

SEQ ID NO: 97 - DNA, 14895 bp, Bacillus sp.
  source 1..14895: mol_type = genomic DNA
tggaagtctttataatgaacccattacttctttaaagtcctggagagaaaatttattaaaagctcatgctgataaagaattaaatcatttaacaagtgatatttttgaacaaaatggtgaaagtccctatggagtatgcggtatgatcggcggaacatgggagtggactagaagtgagcttaaaacaaagagagctttccaccctatttttgagaatgtaccatttaatagtgttaactcatttgccgttcttaaaggaggatcattcttctctcatccaggcttaatgttcccttcttttagagcaaaagatattcctttctgtcgacacaatgaaatggggattagatgcgtaaagaatattccagtatataaaattagagaatcaattaatgggccaattactaataaagcaatttattaatcattctaggttagagacttgataaaagtatactaacattgtgtagtaatgttcagcttgtagaaaaaacaatgttttttctacaagattttattttaaatgcttttcaaaattatcagggattgagaatcagaaaaagagccattaagctcgatcttagctaggtattacgatcttctgtatattattgtgagaaatatagaagattcagttagttagcatttcgattttaagctgagcctgcaatagcaaagcatctgttttgattattctttttctgatacataagctaattttgtcgcttttcttttttgtcttttcacgcatttcgaggatgacttactataattctttcagcttttctatgtgttaagattcgaatagatgaaataactttaacaagttggtcaataagaacagatttaactttatgttaaaagagtatctcgtatagaacataagaagaatgacgagttttttaagattatcatcaattatgtgagaataaaatattataagggaaaatgaaggctgtcacgtttctcgacagccctagggaattcctctccttttcatttcgcccgtaatttcgggcacagtcccgtcggcaggcacattggcttctggtcgatcgggcttctcatgatgcagcattccaagccgaagacttcacggaaaaatggctgggtgaacacatcttccggtgttccggcgttgtatatttttccgtccagcacactgatcagatagtcagcatattgagcggcttggtttaaatcatggagcaccatgacaacggtgcggccatggtcgcggttcagctttttcagcagttcaagcacttcaatctgatgtgagatgtctaaatacgtggtcggctcatcaagcaaaagcaaatcagtgccttgcgcaagtgccatggaaatccaggctctttgtctttggccgcctgagagggcatcaagtgtccgatccttcagttcaatcatgcccgttgcttccagcgcccactctaccatgtcatgatcctcttgggtatgcttggataacagctttttgtgaggatgtctgccaaaatagcataattcctctaccgtcaatccttcaggagcctgaggagattgtggaagaatggccagtttttttgcgacttcttttgatggctggcggtggatgtcttttccttctagtagcactgtaccgctttttggggccatcagcctggcgagcgatttgaggattgttgatttaccgcagccattagcgccgatgagcgcagtgatttttccttcttctatctttaagtcgactccgtcaataatcactgtactgtcatatgaaagagtgagctggtctgcagccagttttcccatggtatcctctccctactgtttcctcgcttcgaatttcaataaatataagaaataaggcgcgccgatcacggctgtcagtattccggcaggtatttcaaccggaggcatgatgccgcgccctaacgtatctgcaattaataatataatagcaccaatcaatgccgatgcaggcagtaaatatttagctttttctccggtaagccgtctggcgatatgcggagcaagcaagccgataaaaccgattgagccgacgacggctacacagcttcccgccagcgccaccgcggtgaaaatcaggatgaatctcagccggtttgcgttttctccgagaccctgtgcaagctcatccccgagtgacataagatccagcttcggtatgagtatgcagacgatcggaaaaagaatcaaaagccatggcgcaagcagcttgacttcttcccagtttcttccccagaggcttcctgtcagccaaatgagtgcagcattcacgtcgcctggaaacttgaccatcatatattgcattccggcgtggcagaccgcgcctaaagcaatgcctgataaagccagtgaagagggctgaatgctcttttttcgggctatcattaataatagtacagcaataatggcggctccggcaaatgcggagaacggaagcacgtataccggcgactcaggaaagatgagaatcacagccatcgccgcaagtccggagccttttgaaatgccgacaacgtccggggaagcgagcggatttcggatcacaccctgtaaaatcgctccggcagcggcaagtccagcacctgccaaaatcgctaatataatgcggggaaggcgatattgctggatgataaattcaaaggaatgatccagtcccagcagattcgtcactaccgcatcaggtgaaatgtataatgcaccgattccaatgctgatgacggacagaacgattaaaatcacggccaatatgagtatcgccagtaaggggcgtttttgttttctggttgttttcttcatttcaggtttcgccctttccttgccaaatataagaaaaacggcgttccgataatcgcggtgacaatgccgaccggtgattcataaggaaatgcaatccatctggccagaacatctgcgtacaccagcaaaatggcaccgaacagtgccgaaaacggaagcacgtattgataatgttctccgatcagcttgcggacaatatgcgggacgagcagcccgacaaagccaatcggcccggcgacggctacggaagcgccggaaagaattaaaataatcaaactgatcagaatcctgatgccgttcatattttgtccaagcccttttgctgtttcgtctccgagaccgagaacagaaacagaaccggaaaatacgagggcaagcccgatgccaatgacagaaaaaggagcgatggttatgacgtcctgccagttgctgccgtcgattgcgcctgtcatccagtacagaacatcctcacctgactcatttaaaataatgatggcctgtgtcatagaggagaggaacaagtgcacggccattcctgacagcgccagcttgacaggcgtcattccgccggatgaggcaatcatatacacaatcgcgccgcctgctgccgcacccgcaaaagcgaatataacagatgaatagggcgatgccggcagaatgacgagagaagcaacaacaaaaagcgatgcacccgcattcacaccgaaaatttggggtgaagccagaggatttctggtcatagcctgcatcagcgcccctgctacagctaggctggcgccgacaaaaacgccgattaatgtgcggggaaggcgaagagtagagatgatgagctgttcctttgaaccgtcccatacaaaaagatatttcaatgaatctatgatgctgatgtctgaggctcctactgaaagattcagcccaagcccaaatataaaaataatcagtgcaatgataaacatcatcagtcttgatgatgagcgccgtttggctgaatgatacaacagtctcacttccttactgcgtctggttgcaaaaacgaagaagcaaggattcccctcgcttctcatttgtcctatttattatacacttttttaagcacatctttggcgcttgtttcactagacttgatgcctctgaatcttgtccaagtgtcacggtccgcatcatagacttgtccatttttcaccgctttgagatttttccagagcgggttcgttttccactcatctacaatggttttgccttcgttggctgagatgaacaaaatatcaggatcgattttgctcaattgctcaaggctgacctcttgataggcgttatctgacttcacagcgtgtgtaaagcctagcattttaaagatttctccgtcataggatgatgatgtatgaagctggaaggaatccgctcttgcaacgccgagaacgatgttgcggttttcatctttcggaagttcggcttttagatcgttgatgacttttttgtgctcggcaagcttttcttttccttcatcttctttatttaatgctttagcaatggtcgtaaagctgtcgatcgtttcgtcatatgtcgcttcacggctttttaattcaatcgtcggggcgatttttttcagctgtttataaatgtttttatggcgctcagcgtcagcgatgattaaatcaggcttcaaggaactgatgacctcaagattgggttcgctgcgtgtgcctacagatgtgtaatcaatggagctgccgacaagctttttaatcatatcttttttgttgtcatctgcgatgcccaccggcgtaatgccgagattgtgaacggcatccaagaatgaaagctcaagcacaaccacccgcttaggtgtgccgcttactgtcgtttttccttcttcgtcatggatcactctggaatccttagactcgcttttgccgcttccgttgttattctggcttgatgaacagccggatacaatgaggcaggcgagcaataaaacactcatgatggcaatcaacttgttagaataggtgcgcatgtcattcttccttttttcagatttagtaatgagaatcattatcacatgtaacactataatagcatggcttatcatgtcaatatttttttagtaaagaaagctgcgtttttactgctttctcatgaaagcatcatcagacacaaataagtggtatgcagcgttaccgtgtcttcgagacaaaaacgcatgggcgttggctttagaggtttcgaacatatcagcagtgacataaggaaggagagtgctgagataaccggacaatttcttttctatttcatctgttagtgcaaattcaatgtcgccgatattcatgataatcgagaaaacaaagtcgatatcgatatgaaaatgttcctcggcaaaaaccgcaagctcgtgaattcctggtgaacatccggcacgcttatggaaaatctgtttgactaaatcactcacaatccaagcattgtattgctgttctggtgaaaagtattgcattagacatacctcctgctcgtacggataaaggcagcgtttcatggtcgtgtgctccgtgcagcggcttctccttaattttgatttttctgaaaataggtcccgttcctatcactttaccatggacggaaaacaaatagctactaccattcctcctgtttttctcttcaatgttctggaatctgtttcaggtacagacgatcgggtatgaaagaaatatagaaaacatgaaggaggaatatcgacatgaaaccagttgtaaaagagtatacaaatgacgaacagctcatgaaagatgtagaggaattgcagaaaatgggtgttgcgaaagaggatgtatacgtcttagctcacgacgatgacagaacggaacgcctggctgacaacacgaacgccaacacgatcggagccaaagaaacaggtttcaagcacgcggtgggaaatatcttcaataaaaaaggagacgagctccgcaataaaattcacgaaatcggtttttctgaagatgaagccgctcaatttgaaaaacgcttagatgaaggaaaagtgcttctctttgtgacagataacgaaaaagtgaaagcttgggcataaagcaaggaaaaaaccaaaaggccaatgtcggccttttggtttttttgcggtctttgcggtgggattttgcagaatgccgcaataggatagcggaacattttcggttctgaatgtccctcaatttgctattatatttttgtgataaattggaataaaatctcacaaaatagaaaatgggggtacatagtggatgaaaaaagtgatgttagctacggctttgtttttaggattgactccagctggcgcgaacgcagctgatttaggccaccagacgttgggatccaatgatggctggggcgcgtactcgaccggcacgacaggcggatcaaaagcatcctcctcaaatgtgtataccgtcagcaacagaaaccagcttgtctcggcattagggaaggaaacgaacacaacgccaaaaatcatttatatcaagggaacgattgacatgaacgtggatgacaatctgaagccgcttggcctaaatgactataaagatccggagtatgatttggacaaatatttgaaagcctatgatcctagcacatggggcaaaaaagagccgtcgggaacacaagaagaagcgagagcacgctctcagaaaaaccaaaaagcacgggtcatggtggatatccctgcaaacacgacgatcgtcggttcagggactaacgctaaagtcgtgggaggaaacttccaaatcaagagtgataacgtcattattcgcaacattgaattccaggatgcctatgactattttccgcaatggttgtaaaacgacggccagtgaattctgatcaaatggttcagtgagagcgaagcgaacacttgattttttaattttctatcttttataggtcattagagtatacttatttgtcctataaactatttagcagcataatagatttattgaataggtcatttaagttgagcatattagaggaggaaaatcttggagaaatatttgaagaacccgaggatctagatcaggtaccgcaacgttcgcagatgctgctgaagagattattaaaaagctgaaagcaaaaggctatcaattggtaactgtatctcagcttgaagaagtgaagaagcagagaggctattgaataaatgagtagaaagcgccatatcggcgcttttcttttggaagaaaatatagggaaaatggtacttgttaaaaattcggaatatttatacaatatcatatgtatcacattgaaaggaggggcctgctgtccagactgtccgctgtgtaaaaaaaaggaataaaggggggttgacattattttactgatatgtataatataatttgtataagaaaatggaggggccctcgaaacgtaagatgaaaccttagataaaagtgctttttttgttgcaattgaagaattattaatgttaagcttaattaaagataatatctttgaattgtaacgcccctcaaaagtaagaactacaaaaaaagaatacgttatatagaaatatgtttgaaccttcttcagattacaaatatattcggacggactctacctcaaatgcttatctaactatagaatgacatacaagcacaaccttgaaaatttgaaaatataactaccaatgaacttgttcatgtgaattatcgctgtatttaattttctcaattcaatatataatatgccaatacattgttacaagtagaaattaagacacccttgatagccttactatacctaacatgatgtagtattaaatgaatatgtaaatatatttatgataagaagcgacttatttataatcattacatatttttctattggaatgattaagattccaatagaatagtgtataaattatttatcttgaaaggagggatgcctaaaaacgaagaacattaaaaacatatatttgcaccgtctaatggatttatgaaaaatcattttatcagtttgaaaattatgtattatggagctctgaaaaaaaggagaggataaagaatgaaaaaaccgctgggaaaaattgtcgcaagcacagcacttcttatttcagtggcatttagctcatctattgcatcagcagctgagaatcctcagcttaaagaagacctgacgaattttgtaccgaagcattctttggtgcaatcagaattgccttctgtcagtgacaaagctatcaagcaatacttgaaacaaaacggcaaagtctttaaaggcaatccttctgaaagattgaagctgattgaccaaacgaccgatgatctcggctacaagcacttccgttatgtgcctgtcgtaaacggtgtgcctgtgaaagactctcaagtcattattcacgtcgataaatccaacaacgtctatgcgattaacggtgaattaaacaacgatgtttccgccaaaacggcaaacagcaaaaaattatctgcaaatcaggcgctggatcatgcttataaagcgatcggcaaatcacctgaagccgtttctaacggaaccgttgcaaacaaaaacaaagccgagctgaaagcagcagccacaaaagacggcaaataccgcctcgcctatgatgtaaccatccgctacatcgaaccggaacctgcaaactgggaagtaaccgttgatgcggaaacaggaaaaatcctgaaaaagcaaaacaaagtggagcatgccgccacaaccggaacaggtacgactcttaaaggaaaaacggtctcattaaatatttcttctgaaagcggcaaatatgtgctgcgcgatctttctaaacctaccggaacacaaattattacgtacgatctgcaaaaccgcgagtataacctgccgggcacactcgtatccagcaccacaaaccagtttacaacttcttctcagcgcgctgccgttgatgcgcattacaacctcggcaaagtgtatgattatttctatcagaagtttaatcgcaacagctacgacaataaaggcggcaagatcgtatcctccgttcattacggcagcagatacaataacgcagcctggatcggcgaccaaatgatttacggtgacggcgacggtatcctgttctcacctctttccggttcactggacgtaaccgctcatgaaatgacacatggcgttacacaggaaacagccaacctgaactacgaaaatcagccgggcgctttaaacgaatccttctctgatgtattcgggtacttcaacgatactgaggactgggatatcggtgaagatattacgatcagccagccggctctccgcagcttatccaatccgacaaaatacggacagcctgataatttcaaaaattacaaaaaccttccgaacactcctgccggcgactacggcggcgtgcatacaaacagcggaatcccgaacaaagccgcttacaatacgattacaaaaatcggcgtgaacaaagcggagcagatttactatcgtgctctgacggtatacctcactccgtcatcaacttttaaagatgcaaaagccgctttgattcaatctgcgcgggacctttacggctctcaagatgctgcaagcgtagaagctgcctggaatgcagtcggattgtaatcgcatgttcaatccgctccataaccgatcgacgcggcggttcgcgtccggacagcacatcaccgaaatatttcgacggcccagccggctagcgcgttaatccgcggatatatagcggccgcagatctgggaccaataataatgactagagaagaaagaatgaagattgttcatgaaattaaggaacgaatattggataaagtgggatatttttaaaatatatatttatgttacagtaatattgacttttaaaaaaggattgattctaatgaagaaagcagacaagtaagcctcctaaattcactttagataaaaatttaggaggcatatcaaatgaactttaataaaattgatttagacaattggaagagaaaagagatatttaatcattatttgaaccaacaaacgacttttagtataaccacagaaattgatattagtgttttataccgaaacataaaacaagaaggatataaattttaccctgcatttattttcttagtgacaagggtgataaactcaaatacagcttttagaactggttacaatagcgacggagagttaggttattgggataagttagagccactttatacaatttttgatggtgtatctaaaacattctctggtatttggactcctgtaaagaatgacttcaaagagttttatgatttatacctttctgatgtagagaaatataatggttcggggaaattgtttcccaaaacacctatacctgaaaatgctttttctctttctattattccatggacttcatttactgggtttaacttaaatatcaataataatagtaattaccttctacccattattacagcaggaaaattcattaataaaggtaattcaatatatttaccgctatctttacaggtacatcattctgtttgtgatggttatcatgcaggattgtttatgaactctattcaggaattgtcagataggcctaatgactggcttttatatgagataatgccgactgtactttttacagtcggttttctaacgatacattaataggtacgaaaaagcaactttttttgcgcttaaaaccagtcataccaataacttaagggtaactagcctcgccggaaagagcgaaaatgcctcacatttgtgccacctaaaaaggagcgatttacatatgagttatgcagtttgtagaatgcaaaaagtgaaatcagctggactaaaaggggccgcagagtagaatggaaaaggggatcggaaaacaagtatataggaggagacctatttatggcttcagaaaaagacgcaggaaaacagtcagcagtaaagcttgttccattgcttattactgtcgctgtgggactaatcatctggtttattcccgctccgtccggacttgaacctaaagcttggcatttgtttgcgatttttgtcgcaacaattatcggctttatctccaagcccttgccaatgggtgcaattgcaatttttgcattggcggttactgcactaactggaacactatcaattgaggatacattaagcggattcgggaataagaccatttggcttatcgttatcgcattctttatttcccggggatttatcaaaaccggtctcggtgcgagaatttcgtatgtattcgttcagaaattcggaaaaaaaacccttggactttcttattcactgctattcagtgatttaatactttcacctgctattccaagtaatacggcgcgtgcaggaggcattatatttcctattatcagatcattatccgaaacattcggatcaagcccggcaaatggaacagagagaaaaatcggtgcattcttattaaaaaccggttttcaggggaatctgatcacatctgctatgttcctgacagcgatggcggcgaacccgctgattgccaagctggcccatgatgtcgcaggggtggacttaacatggacaagctgggcaattgccgcgattgtaccgggacttgtaagcttaatcatcacgccgcttgtgatttacaaactgtatccgccggaaatcaaagaaacaccggatgcggcgaaaatcgcaacagaaaaactgaaagaaatgggaccgttcaaaaaatcggagctttccatggttatcgtgtttcttttggtgcttgtgctgtggatttttggcggcagcttcaacatcgacgctaccacaaccgcattgatcggtttggccgttctcttattatcacaagttctgacttgggatgatatcaagaaagaacagggcgcttgggatacgctcacttggtttgcggcgcttgtcatgctcgccaacttcttgaatgaattaggcatggtgtcttggttcagtaatgccatgaaatcatccgtatcagggttctcttggattgtggcattcatcattttaattgttgtgtattattactctcactatttctttgcaagtgcgacagcccacatcagtgcgatgtattcagcatttttggctgtcgtcgtggcagcgggcgcaccgccgcttttagcagcgctgagcctcgcgttcatcagcaacctgttcgggtcaacgactcactacggttctggagcggctccggtcttcttcggagcaggctacatcccgcaaggcaaatggtggtccatcggatttatcctgtcgattgttcatatcatcgtatggcttgtgatcggcggattatggtggaaagtactaggaatatggtagaaagaaaaaggcagacgcggtctgcctttttttattttcactccttcgtaagaaaatggattttgaaaaatgagaaaattccctgtgaaaaatggtatgatctaggtagaaaggacggctggtgctgtggtgaaaaagcggttccatttttccctgcaaacaaaaataatggggctgattgcggctctgctggtctttgtcattggtgtgctgaccattacgttagccgttcagcatacacagggagaacggagacaggcagagcagctggcggttcaaacggcgagaaccatttcctatatgccgccggttaaagagctcattgagagaaaagacggacatgcggctcagacgcaagaggtcattgaacaaatgaaagaacagactggtgcgtttgccatttatgttttgaacgaaaaaggagacattcgcagcgcctctggaaaaagcggattaaagaaactggagcgcagcagagaaattttgtttggcggttcgcatgtttctgaaacaaaagcggatggacgaagagtgatcagagggagcgcgccgattataaaagaacagaagggatacagccaagtgatcggcagcgtgtctgttgattttctgcaaacggagacagagcaaagcatcaaaaagcatttgagaaatttgagtgtgattgctgtgcttgtactgctgctcggatttattggcgccgccgtgctggcgaaaagcatcagaaaggatacgctcgggcttgaaccgcatgagatcgcggctctatatcgtgagaggaacgcaatgcttttcgcgattcgagaagggattattgccaccaatcgtgaaggcgtcgtcaccatgatgaacgtatcggcggccgagatgctgaagctgcccgagcctgtgatccatcttcctatagatgacgtcatgccgggagcagggctgatgtctgtgcttgaaaaaggagaaatgctgccgaaccaggaagtaagcgtcaacgatcaagtgtttattatcaatacgaaagtgatgaatcaaggcgggcaggcgtatgggattgtcgtcagcttcagggagaaaacagagctgaagaagctgatcgacacattgacagaggttcgcaaatattcagaggatctcagggcgcagactcatgaattttcaaataagctttatgcgattttagggctgcttgagcttggggagtatgatgaagccattgatctgattaaagaggaatatgcgatacaaaatgaacagcatgatcttttattccataacatccattcgcagcaggtgcaggccattttgttagggaaaataagcaaggcatcggaaaagaaggtcaagctggtgattgatgagaacagctcactcgcgcctcttcctgcgcatatcggcttgtcccatcttattacgattattggcaatttaattgataacgctttcgaagctgtagcggagcaaagcgtgaaggaagttttgttttttatcacggatatgggccatgacattgtcattgaagtatcagacacagggcccggtgtgccgccagagaaaatagaagctgtgtttgagagaggctattcttcaaaggggatgaggagaggctacggtctggccaatgtgaaagactcagtgcgtgaactgggcggctggatcgaactggcgaatcaaaaaactggcggggcggtattcactgtatttataccgaaggagaaacaaagggggaatccatttgattcacatcgcgattgcggaggatgattttcgagttgcgcaaatccatgagagattgattaaacagcttgatggattcaagattatcggcaaggcggctaacgcaaaagagacattggcgcttttgaaggaacacaaggctgatttgcttctgctggatatttatatgccggacgagcttgggaccgcgttgattcctgatatacgaagccgatttcctgaagtggacattatgattatcacagcggcaacagaaacccgtcatttgcaggaagcgctaagggcgggaattgcccactatttgatcaaacccgtaacagctgacaagttcaggcaggtgctgcttcagtataaagaaaaaaggaagctgctcatgtctcagccggaggtcagccaatccatgatcgaccatatttttgggaacggtgtgaagacagctttgccggcagaggatttgccgactggcattaattcgattacactgcgaaaaattaaggaagcgcttcagactgcgtcagaaggattgacagcggaggaacttggggaaaaaatgggggcgtcacgaacaactgcccgccgttatgccgagtaccttgtgtcaaaggaagaagcaagagccgagcttgaatacgggattatcggcaggccggagagaaaatattatttggcggcggattagatatgaaaaaatctataatcctattgaatattctattgatctttatgcagggtgatatcaggcaggcggctgcgccgcgcctgccggacgggccgatagaaattgtcgtccctgccgaaccttctggcggctgggatgtcacagcgcaggcgatccaatcagttttgaggcagaagcagatcgtgaaggatgatgttcatatcgtctataaatccggcggcgggggagagaaaggctggaaatatgtcaacaaaagcagcaaacaaaccatcagcatgacgtccagcctaatattgagcaatgatcttctcgggcaaagcaaattaaaaatgtccgattttacg

SEQ ID NO: 98 - protein, 253 aa, Penicillium emersonii
MLSSTTRTLAFTGLAGLLSAPLVKAHGFVQGIVIGDQFYSGYIVNSFPYESNPPPVIGWATTATDLGFVDGTGYQGPDIICHRNATPAPLTAPVAAGGTVELQWTPWPDSHHGPVITYLAPCNGNCSTVDKTTLEFFKIDQQGLIDDTSPPGTWASDNLIANNNSWTVTIPNSVAPGNYVLRHEIIALHSANNKDGAQNYPQCINIEVTGGGSDAPEGTLGEDLYHDTDPGILVDIYEPIATYTIPGPPEPTF

SEQ ID NO: 99 - protein, 249 aa, Penicillium emersonii
MSFSKIIATAGVLASASLVAGHGFVQNIVIDGKNYGGYLVNQYPYMSNPPEVIAWSTTATDLGFVDGTGYQTPDIICHRGAKPGALTAPVSPGGTVELQWTPWPDSHHGPVINYLAPCNGDCSTVDKTQLEFFKIAESGLINDDNPPGIWASDNLIAANNSWTVTIPTTIAPGNYVLRHEIIALHSAQNQDGAQNYPQCINLQVTGGGSDNPAGTLGTALYHDTDPGILINIYQKLSSYIIPGPPLYTG

SEQ ID NO: 100 - protein, 291 aa, Thermomyces lanuginosus
MRSSLVLFFVSAWTALASPIRREVSQDLFNQFNLFAQYSAAAYCGKNNDAPAGTNITCTGNACPEVEKADATFLYSFEDSGVGDVTGFLALDNTNKLIVLSFRGSRSIENWIGNLNFDLKEINDICSGCRGHDGFTSSWRSVADTLRQKVEDAVREHPDYRVVFTGHSLGGALATVAGADLRGNGYDIDVFSYGAPRVGNRAFAEFLTVQTGGTLYRITHTNDIVPRLPPREFGYSHSSPEYWIKSGTLVPVTRNDIVKIEGIDATGGNNQPNIPDIPAHLWYFGLIGTCL

SEQ ID NO: 101 - protein, 269 aa, Thermomyces lanuginosus
EVSQDLFNQFNLFAQYSAAAYCGKNNRAPAGTNITCTGNACPEVEKADATFLYSFEDSGVGDVTGFLALDNTNKLIVLSFRGSRSIENWINNLRFDLKEINDICSGCRGHAGFTSSWRSVADTLRQKVEDAVREHPDYRVVFTGHSLGGALATVAGADLRGNGYDIDVFSYGAPRVGNRAFAEFLTVQTGGTLYRITHTNDIVPRLPPREFGYSHPSPEYWIKSGTGVPVTRNDIVKIEGIDATGGNNQPNIPDITAHLWYFGLIGTCL

SEQ ID NO: 102 - protein, 194 aa, Humicola insolens
QLGAIQNDLESGSPDACPDAILIFARGSTEPGNMGITVGPALANGLKEHIPNIWIQGVGGPYDAALATNFLPRGTSQANIDEGKRLFHLAHQKCPNTPVVAGGYSQGAALIAAAVSELSGAVKEQVKGVVLFGYTQNLQNRGGIPNYPRERTKVFCNVGDAVCTGTLIITPAHLSYTIQARGEAARFLVDRIRA

SEQ ID NO: 103 - protein, 274 aa, Thermomyces lanuginosus
SPIRREVSQDLFNQFNLFAQYSAAAYCGKNNDAPAGTNITCTGNACPEVEKADATFLYSFEDSGVGDVTGFLALDNTNKLIVLSFRGSRSIENWIGNLNFDLKEINDICSGCRGHDGFTSSWRSVADTLRQKVEDAVREHPDYRVVFTGHSLGGALATVAGADLRGNGYDIDVFSYGAPRVGNRAFAEFLTVQTGGTLYRITHTNDIVPRLPPREFGYSHSSPEYWIKSGTLVPVRRRDIVKIEGIDATGGNNQPNIPDIPAHLWYFGLIGTCL

SEQ ID NO: 104 - protein, 638 aa, Aspergillus niger
MKLPLFAAAAAGLANAASLPVERAEAEVASVAADLIVRALPNAPDGYTPSNVTCPSTRPSIRDASGISTNETEWLKVRRNATLTPMKNLLSRLNLTGFDTTSYINEHSSNISNIPNIAIAASGGGYRALTNGAGALKAFDSRSDNATNSGQLGGLLQAATYVSGLSGGSWLVGSMFVNNFSSIGELQASEKVWRFDKSLLEGPNFDHIQIVSTVEYWKDITEEVDGKANAGFNTSFTDYWGRALSYQLVNASDDKGGPDYTWSSIALMDDFKNGQYPMPIVVADGRNPGEIIVETNATVYEVNPWEFGSFDPSVYAFAPLQYLGSRFENGSIPDNGTCVSGFDNAGFIMGSSSTLFNQFLLQINSTSIPTILKDAFTDILEDLGERNDDIAVYSPNPFSGYRDSSEDYATAKDLDVVDGGEDGENIPLHPLIQPERAVDVIFAIDSSADTDYYWPNGTSLVATYERSLEPSIANGTAFPAVPDQNTFVNLGLNSRPTFFGCDPKNISGTAPLVIYLPNSPYTYDSNFSTFKLTYSDEERDSVITNGWNVVTRGNGTVDDNFPSCVACAILQALHYRTNTSLPDICTTCFNDYCWNGTTNSTTPGAYEPSVLIATSGAIKSVLDYSVLALAMGVAAFML

SEQ ID NO: 105 - protein, 331 aa, Aspergillus aculeatus
MVKSVLASALFAVSALAASRTTAPSGAIVVAKSGGDYTTIGDAIDALSTSTTDTQTIFIEEGTYDEQVYLPAMTGKVIIYGQTENTDSYADNLVTITHAISYEDAGESDDLTATFRNKAVGSQVYNLNIANTCGQACHQALALSAWADQQGYYGCNFTGYQDTLLAQTGNQLYINSYIEGAVDFIFGQHARAWFQNVDIRVVEGPTSASITANGRSSETDTSYYVINKSTVAAKEGDDVAEGTYYLGRPWSEYARVVFQQTSMTNVINSLGWTEWSTSTPNTEYVTFGEYANTGAGSEGTRASFAEKLDAKLTITDILGSDYTSWVDTSYF

SEQ ID NO: 106 - protein, 633 aa, Valsaria rubricosa
MKFFTTILSTASLVAALPAAVDSNHTPAAPELVARLPLERRAISADLLATFSLFEQFAAAAYCPDNNDSPDTKLTCSVGNCPLVEADTTSTVTEFENSLETDVTGYVATDSTRELIVVAFRGSSSIRNWIADIDFPFTDTDLCDGCQAASGFWTSWTEARTGVLAAVASAAAANPSYTVAVTGHSLGGAVAALAAGALRNAGYTVALYSFGAPRVGDETLSEYITAQAGGNYRITHLNDPVPKLPPLLLGYRHISPEYYISSGNNVTVTADDVEEYTGTINLSGNTGDLTFDTDAHSWYFNEIGACDDGEALEWKKRGVEVQWVKRAAVDSNHTPAAPELVARRLPLERRAISADLLATFSLFEQFAAAAYCPDNNDSPDTKLTCSVGNCPLVEADTTSTVTEFENSLETDVTGYVATDSTRELIVVAFRGSSSIRNWIADIDFPFTDTDLCDGCQAASGFWTSWTEARTGVLAAVASAAAANPSYTVAVTGHSLGGAVAALAAGALRNAGYTVALYSFGAPRVGDETLSEYITAQAGGNYRITHLNDPVPKLPPLLLGYRHISPEYYISSGNNVTVTADDVEEYTGTINLSGNTGDLTFDTDAHSWYFNEIGACDDGEALEWKKRGVEVQWV

SEQ ID NO: 107 - protein, 298 aa, Pseudomonas sp.
AQESPAFIDPASWNTPFNGIAQVACHNCYEKQYANTFSSVLDSVRTLELDFWDQRDAVSGGSPHHWFVRHNPGTLFQSGNDNNCTGDGTGKNDLEACLNDVKNWSDKHPGHFPITLILDKKQGWSKESSGRTPKDFDELVARVFQGKLFTPQDLATHIGSGAGALQGNLKGKSWPTANDLQGKVLLVLNHSENQKLSQYAEARTSKAKVFISPVTNGQNDISGKVSGMSSQSSGYVAMNNMGKGDKSWAKQAFAYSHIGRVWGDDEVSFAQHINQKINLSAYYRFAAQSAGGYRIRPF

SEQ ID NO: 108 - protein, 245 aa, Bacillus thuringiensis
WSAEDKHKEGVNSHLWIVNRAIDIMSRNTTLVKQDRVAQLNEWRTELENGIYAADYENPYYDNSTFASHFYDPDNGKTYIPFAKQAKETGAKYFKLAGESYKNKDMKQAFFYLGLSLHYLGDVNQPMHAANFTNLSYPQGFHSKYENFVDTIKDNYKVTDGNGYWNWKGTNPEDWIHGAAVVAKQDYSGIVNDNTKDWFVKAAVSQEYADKWRAEVTPMTGKRLMDAQRVTAGYIQLWFDTYGDR

SEQ ID NO: 109 - protein, 486 aa, Geobacillus stearothermophilus
AAPFNGTMMQYFEWYLPDDGTLWTKVANEANNLSSLGITALWLPPAYKGTSRSDVGYGVYDLYDLGEFNQKGTVRTKYGTKAQYLQAIQAAHAAGMQVYADVVFDHKGGADGTEWVDAVEVNPSDRNQEISGTYQIQAWTKFDFPGRGNTYSSFKWRWYHFDGVDWDESRKLSRIYKFRGKAWDWEVDTEFGNYDYLMYADLDMDHPEVVTELKNWGKWYVNTTNIDGFRLDAVKHIKFSFFPDWLSYVRSQTGKPLFTVGEYWSYDINKLHNYITKTDGTMSLFDAPLHNKFYTASKSGGAFDMRTLMTNTLMKDQPTLAVTFVDNHDTEPGQALQSWVDPWFKPLAYAFILTRQEGYPCVFYGDYYGIPQYNIPSLKSKIDPLLIARRDYAYGTQHDYLDHSDIIGWTREGGTEKPGSGLAALITDGPGGSKWMYVGKQHAGKVFYDLTGNRSDTVTINSDGWGEFKVNGGSVSVWVPRKTTVS

SEQ ID NO: 110 - protein, 498 aa, Aspergillus oryzae
MVAWWSLFLYGLQVAAPALAATPADWRSQSIYFLLTDRFARTDGSTTATCNTADQKYCGGTWQGIIDKLDYIQGMGFTAIWITPVTAQLPQTTAYGDAYHGYWQQDIYSLNENYGTADDLKALSSALHERGMYLMVDVVANHMGYDGAGSSVDYSVFKPFSSQDYFHPFCFIQNYEDQTQVEDCWLGDNTVSLPDLDTTKDVVKNEWYDWVGSLVSNYSIDGLRIDTVKHVQKDFWPGYNKAAGVYCIGEVLDGDPAYTCPYQNVMDGVLNYPIYYPLLNAFKSTSGSMDDLYNMINTVKSDCPDSTLLGTFVENHDNPRFASYTNDIALAKNVAAFIILNDGIPIIYAGQEQHYAGGNDPANREATWLSGYPTDSELYKLIASANAIRNYAISKDTGFVTYKNWPIYKDDTTIAMRKGTDGSQIVTILSNKGASGDSYTLSLSGAGYTAGQQLTEVIGCTTVTVGSDGNVPVPMAGGLPRVLYPTEKLAGSKICSSS

SEQ ID NO: 111 - protein, 483 aa, Alkalihalobacillus akibai
HHNGTNGTMMQYFEWYLPNDGNHWNRLRSDASNLKDKGISAVWIPPAWKGASQNDVGYGAYDLYDLGEFNQKGTIRTKYGTRNQLQAAVNALKSNGIQVYGDVVMNHKGGADATEMVKAVEVNPNNRNQEVSGEYTIEAWTKFDFPGRGNTHSNFKWRWYHFDGVDWDQSRKLNNRIYKFRGKGWDWEVDTEFGNYDYLMYADIDMDHPEVVNELRNWGVWYTNTLGLDGFRIDAVKHIKYSFTRDWINHVRSATGKNMFAVAEFWKNDLGAIENYLNKTNWNHSVFDVPLHYNLYNASKSGGNYDMRQIFNGTVVQKHPMHAVTFVDNHDSQPEEALESFVEEWFKPLAYALTLTREQGYPSVFYGDYYGIPTHGVPAMKSKIDPILEARQKYAYGRQNDYLDHHNIIGWTREGNTAHPNSGLATIMSDGAGGNKWMFVGRNKAGQVWTDITGNKAGTVTINADGWGNFSVNGGSVSIWVNK

SEQ ID NO: 112 - protein, 519 aa, Geobacillus stearothermophilus
MKQQKRLYARLLTLLFALIFLLPHSAAAAAPFNGTMMQYFEWYLPDDGTLWTKVANEANNLSSLGITALWLPPAYKGTSRSDVGYGAYDLYDLGEFNQKGTVRTKYGTKAQYLQAIQAAHAAGMQVYADVVFDHKGGADGTEWVDAVEVNPSDRNQVISGTYQIQAWTKFDFPGRGNTYSSFKWRWYHFDGVDWDESRKLSRIYLFSGKQWDWPVDNEFGNYDYLMYADLDMDHPEVTTELKNWGKWYVNTTNIDGFRLDAVKHIKFYFFPDWLSYVRSSTGKPLFTVGEYWSGDINKLHNYITITDGTVSLFDAPLHYKFYNASKSGGAFDMRTLMTNTLMKDQPTLAVTFVDNHDTEPGQALQSWVDPWFKPLAYAFILTRQEGYPCVFYGDYYGIPQYNIPSLKSKIDPLLIARRDYAYGTQHDYLDHSDIIGWTREGGTEKPGSGLAALITDGPGGSKWMYVGKQHAGKVFYDLTGNRSDTVTINSDGWGEFKVNGGSVSVWVPRKTTVSTIARP

SEQ ID NO: 113 - protein, 491 aa, Pyrococcus furiosus
AAPFNGTMMQYFEWYLPDDGTLWTKVANEANNLSSLGITALWLPPAYKGTSRSDVGYGAYDLYDLGEFNQKGTVRTKYGTKAQYLQAIRAAHAAGMQVYADVVFDHKGGADGTEWVDAVEVNPSDRNQVISGTYQIQAWTKFDFPGRGNTYSSFKWRWYHFDGVDWDESRKLSRIYLFEGKAWDWEVDTEFGNYDYLMYADLDMDHPEVVTELKNWGKWYVNTTNIDGFRLDAVKHIKFSFFPDWLSYVRSSTGKPLFTVGEYWSYDINKLHNYITKTDGTVSLFDAPLHNKFYTASKSGGAFDMRTLMTNTLMKDQPTLAVTFVDNHDTEPGQALQSWVDPWFKPLAYAFILTRQEGYPCVFYGDYYGIPQYNIPSLKSKIDPLLIARRDYAYGTQHDYLDHSDIIGWTREGGTEKPGSGLAALITDGPGGSKWMYVGKQHAGKVFYDLTGNRSDTVTINSDGWGEFKVNGGSVSVWVPRKTTVSTIARP

SEQ ID NO: 114 - protein, 305 aa, Humicola insolens
MRSSPLLRSAVVAALPVLALAADGRSTRYWDCCKPSCGWAKKAPVNQPVFSCNANFQRITDFDAKSGCEPGGVAYSCADQTPWAVNDDFALGFAATSIAGSNEAGWCCACYELTFTSGPVAGKKMVVQSTSTGGDLGSNHFDLNIPGGGVGIFDGCTPQFGGLPGQRYGGISSRNECDRFPDALKPGCYWRFDWFKNADNPSFSFRQVQCPAELVARTGCRRNDDGNFPAVQIPSSSTSSPVNQPTSTSTTSTSTTSSPPVQPTTPSGCTAERWAQCGGNGWSGCTTCVAGSTCTKINDWYHQCL

SEQ ID NO: 115 - protein, 477 aa, Evansstolkia leycettana
MAPKLAFTALAVLPIVAAQQIGTTPETHPSLTTWKCTTGGGCVAQDTSIVIDWGYHWIHQTGTDVSCTTSNGVNSTLCPNEATCSQNCVIEGANYTSSGVATSGSSLTLHQYVQSNGQTSNASPRVYLLGPDGNYVMLQLLGQELSFDVDVSTLVCGENGALYLSEMDATGGRSQYNPGGANYGSGYCDAQCPVETWMNGTLNTSGQGYCCNEMDLWEANAYATAYTPHPCGNGSCDKSGCGFNPYALGDHSYYGPGLTVDTSKPFTVTTQFITNDGTTTGTLTEIRRQYIQNGKVIANAVSSSGVDSITESWCVSVDGAAASFGGLTTMGQALSRGMVLVFSIWNDNSQFMNWLDSGSSGPCSSTAGNPATIEAQDPGTYVTFSNIKWGDIGSTFQSSSGGSSSTSTTTSTTSKQTSTTTTTTTTTTTKPTSTTTTATGATQTHWGQCGGETWTGPTVCAPPYSCQTQNPWYAQCL

SEQ ID NO: 116 - protein, 299 aa, Thermothielavioides terrestris
MRSTPVLRTTLAAALPLVASAASGSGQSTRYWDCCKPSCAWPGKAAVSQPVYACDANFQRLSDFNVQSGCNGGSAYSCADQTPWAVNDNLAYGFAATSIAGGSESSWCCACYALTFTSGPVAGKTMVVQSTSTGGDLGSNHFDIAMPGGGVGIFNGCSSQFGGLPGAQYGGISSRDQCDSFPAPLKPGCQWRFDWFQNADNPTFTFQQVQCPAEIVARSGCKRNDDSSFPVFTPPSGGNGGTGTPTSTAPGSGQTSPGGGSGCTSQKWAQCGGIGFSGCTTCVSGTTCQKLNDYYSQCL

SEQ ID NO: 117 - protein, 516 aa, Aspergillus niger
MLNPKVAYMVWMTCLGLTLPSQAQSNDYRPSYHFTPDQYWMNEPNGLIKIGSTWHLFFQHNPTANVWGNICWGHATSTDLMHWAHKPTAIADENGVEAFTGTAYYDPNNTSGLGDSANPPYLAWFTGYTTSSQTQDQRLAFSVDNGATWTKFQGNPIISTSQEAPHDITGGLESRDPKVFFHRQSGNWIMVLAHGGQDKLSFWTSADTINWTWQSDLKSTSINGLSSDITGWEVPDMFELPVEGTEETTWVVMMTPAEGSPAGGNGVLAITGSFDGKSFTADPVDASTMWLDNGRDFDGALSWVNVPASDGRRIIAAVMNSYGSNPPTTTWKGMLSFPRTLSLKKVGTQQHFVQQPITELDTISTSLQILANQTITPGQTLLSSIRGTALDVRVAFYPDAGSVLSLAVRKGASEQTVIKYTQSDATLSVDRTESGDISYDPAAGGVHTAKLEEDGTGLVSIRVLVDTCSVEVFGGQGEAVISDLIFPSDSSDGLALEVTGGNAVLQSVDVRSVSLE

SEQ ID NO: 118 - protein, 397 aa, Aspergillus fumigatus
MVHLSSLAAALAALPLVYGAGLNTAAKAKGLKYFGSATDNPELTDSAYVAQLSNTDDFGQITPGNSMKWDATEPSQNSFSFANGDAVVNLANKNGQLMRCHTLVWHSQLPNWVSSGSWTNATLLAAMKNHITNVVTHYKGKCYAWDVVNEALNEDGTFRNSVFYQIIGPAYIPIAFATAAAADPDVKLYYNDYNIEYSGAKATAAQNIVKMIKAYGAKIDGVGLQAHFIVGSTPSQSDLTTVLKGYTALGVEVAYTELDIRMQLPSTAAKLAQQSTDFQGVAAACVSTTGCVGVTIWDWTDKYSWVPSVFQGYGAPLPWDENYVKKPAYDGLMAGLGASGSGTTTTTTTTSTTTGGTDPTGVAQKWGQCGGIGWTGPTTCVSGTTCQKLNDWYSQCL

SEQ ID NO: 119 - protein, 405 aa, Evansstolkia leycettana
MVHLSSLALALAAGSQLAQAAGLNTAAKAIGKLYFGTATDNPELSDSTYMQETDNTDDFGQLTPANSMKWDATEPSQNTFTFTNGDQIANLAKSNGQMLRCHNLVWYNQLPSWVTSGSWTNATLLAAMKNHITNVVTHYKGQCYAWDVVNEALNDDGTYRSNVFYQYIGEAYIPIAFATAAAADPNAKLYYNDYNIEYPGAKATAAQNIVKMVKAYGAKIDGVGLQSHFIVGSTPSQSSQQSNMAAFTALGVEVAITELDIRMTLPSTSALLAQQSTDYQSTVSACVNTPKCIGITLWDWTDKYSWVPNTFSGQGDACPWDSNYQKKPAYYGILTALGGSASTSTTTTLVTSTRTSTTTSTSATSTSTGVAQHWGQCGGIGWTGPTTCASPYTCQELNPYYYQCL

SEQ ID NO: 120 - protein, 434 aa, Bacillus sp.
MKKPLGKIVASTALLISVAFSSSIASAAVHSKTPDILGTTGKNNLNQAYKKYFDTKGDGKGGSLFHYMKDGSAYIASTTDDNLLGNGYYSVKTEGMSYGMMITLQMNDEYKFQKLWDFVRKYMRHSDRNDSLYGYHSWHMKTNGSDVQTIDQNVASDGEVWFAAALMMASGRWGDKKYPYDYKARAQDMLDALAGDGEYANTGKESRVFIKNSKDQRYAMVRFGPYVNWTDPSYHVPAFFELFAKSAKSSQQYFWKDAANKSRTYLSETTFKSVLNNGSTVTNAATGLFPDEAGFDGVSDAAHSSTETDRNFSYDAWRTVSHIAMDHTLWSSADNAYRASEQKAVNKFLTFMKRENYGRTAHEYTLNGTAVKKGSPVGLIAANAGGATAASDASLRTGFANAFNSTYIPEDYYGSCLYMLNSLVANGKFAMYLP

SEQ ID NO: 121 - protein, 420 aa, synthetic construct
MKKPLGKIVASTALLISVAFSSSIASAHHHHHHPRTPAAQSAASPAAAEAAPTAAGDKVIGYFTNWGTYDRNYHVKNIETSGSADKLTHINYAFGNVIGGKCTIGDSYADYEKAYTADQSVDGVADTWDQPLRGNFNQLRKLKKLHPDLKILWSFGGWTWSGGFGQAAQNPAAFAKSCRDLVEDPRWADVFDGIDIDWEYPNACGLTCDTSGRDAYGNLLGELRKSFGTDLVTSAITADGSDGGKIDAVDYAGAAKHLDWYLPMTYDFFGAWEAKGPTAPHSPLTSYPGVPTEGFNSDAAISKLKSLGIPPEKLLLGIGFYGRGWTGVTRSEPGGSATGAAAGTYEAGIEDYRVLKNSCPATGKVAGTAYAHCGTDWWSYDTPETIGSKMNYKNEQGLGGTFFWELSGDTGNGELIKAIR

SEQ ID NO: 122 - protein, 624 aa, Streptomyces griseus
LSTDTPQRRSRFRWIPVRSGRSKVVAGLTALVVPLAAMVGLAAPASAAASATATYTKKSDWGSGFEGQWTVKNTGTTALSSWTIEWDFPSGTTAGSAWDAALTSSGGHYTAKNLSWNGSVAPGASISFGFNGTGSGSPTGCKLNGASCDGGPTVPGDNPPTAPGAPTTSDVTDTSVKLSWSAATDDKGVKNYDVLRDGAKVATVTGTTYTNTGLTAGTDYSYAVQARDTADQTGPVSGAVSVRTTGGGGEQPGGDKVNLGYFTNWGVYGRNYHVKNLVTSGSAAKITHINYAFGNVQNGKCTIGDSYADYDKAYTADQSVDGVADTWDQPLRGNFNQLRKLKAKYPHIKILWSFGGWTWSGGFGQAVQNPAAFAQSCYDLVEDPRWADVFDGIDLDWEYPNACGLTCDTSGPAALKTMADAMRAKFGTKNLVTAAITADGSNGGKIDAADYGGASQSFDWYNVMTYDFFGAWAAKGPTAPHSPLTPYTGIPQAGFSSSEAIAKLKAKGVPAKKLLLGIGFYGRGWTGVTQSAPGGTATGAAPGTYEAGNEDYKVLKNTCPSTGTIAGTAYAHCGTNWWSYDTPATIGTKMTWAKNQGLGGAFFWEFSGDTSNGELVNAIKTGLQ

SEQ ID NO: 123 - protein, 575 aa, Streptomyces griseus
VERSAGSSRRRRRSRPVLGGTMAVVAAAALTVTGLVSTAQAADVNNARNAGFESGLANWTCAGNSGAIVSSPVHGGTSALKATPAGQDNAKCSQAVKVKPNSTYALSSWVQGGYAYLGVSGTGTTDVSTWTPGSTTWTKLSTSFKTGANTTSVTVYTHGWYGQAAYLADDFEVTGPDGGGGEEPGPVIPAAPGGLAAGATTTSSVSLSWNAVSGATGYTVYRDGTKATTSTGTSATVTGLTADTAYQFSVSATNAAGESVKSAAISARTAKQGTGPGPGPSVPKHAVTGYWQNFNNGAAVQKLSDVPADYDIIAVSFADATATQGAVTFNLDTAGLNGYTDAQFRSDIKAKQAAGKNVIISIGGELGTVRVDSDASATAFSNSVYALMQDYGFNGVDIDLENGLNSTYMTKALRQLSAKAGSGLVITMAPQTIDMQSTSGEYFKTALNVKDILTVVNMQYYNSGSMLGCDGKVYSQGSVDFLTALACIQLEGGLDPSQVGIGVPASTRGAGSGYVSPSIVNAALDCLAKGTNCGSFKPSKTYPSLRGAMTWSTNWDATAGFAWSKAVGPHVRSLP

SEQ ID NO: 124 - protein, 346 aa, Parengyodontium album
MSRLLEASLVLLPLLSTLAGAAPATVSARAETCALKGKPSGKVLQGYWENWDGAKNGVHPPFGWTPIQNPQILQHGYNVIQAAFPIIMPDGTAKWEDGMDRDVKVASPTEMCEAKANGATILMSIGGATAAINLGSSAVADKFISTIVPILKKYNFDGIDIDIESGLTGSGNINQLSTSQSNLIRIIDGILAQMPANFGLTMAPETAYVTGGSVTYGSIWGAYLPIIKKYADNGRLWWLNMQYYNGEMYGCKGDSYKAGTVEGFIAQTDCLDKGLVVQGTTIRVPYDKQVPGLPAQQGAGGGYMAPSLVAQAWNHYGGKLKGLMTWSINWDGSKGWTFGDNVKGLF

SEQ ID NO: 125 - protein, 379 aa, Aspergillus tubingensis
MKYSTIFSAAAAVFAGSAAAVGVSGSAEGFAKGVTGGGSATPVYPDTIDELVSYLGDDEARVIVLTKTFDFTDSEGTTTGTGCAPWGTASACQVAIDQDDWCENYEPDAPSVSVEYYNAGTLGITVTSNKSLIGEGSSGAIKGKGLRIVSGAENIIIQNIAVTDINAKYVWGGDAITLDDCDLVWIDHVTTARIGRQHYVLGTSADNRVSLTNNYIDGVSDYSATCDGYHYWAIYLDGDADLVTMKGNYIYHTSGRSPKVQDNTLLHAVNNYWYDISGHAFEIGEGGYVLAEGNVFQNVDTVLETYEGEAFTVPSTTAGEVCSTYLGRDCVINGFGSSGTFSEDSTSFLSDFEGKNIASASAYTSVASSVVANAGQGNL

SEQ ID NO: 126 - protein, 863 aa, Aspergillus fumigatus
MRFGWLEVAALTAASVANAQELAFSPPFYPSPWADGQGEWADAHRRAVEIVSQMTLAEKVNLTTGTGWEMDRCVGQTGSVPRLGINWGLCGQDSPLGIRDSDLNSAFPAGTNVAATWDKTLAYLRGKAMGEEFNDKGVDILLGPAAGPLGKYPDGGRIWEGFSPDPVLTGVLFAETIKGIQDAGVIATAKHYILNEQEHFRQVGEAQGYGYNITETISSNVDDKTMHELYLWPFADAVRAGVGAVMCSYNQINNSYGCQNSQTLNKLLKAELGFQGFVMSDWGAHHSGVGAALAGLDMSMPGDISFDDGLSFWGTNLTVSVLNGTVPAWRVDDMAVRIMTAYYKVGRDRLRIPPNFSSWTRDEYGWEHSAVSEGAWTKVNDFVNVQRSHSQIIREIGAASTVLLKNTGALPLTGKEVKVGVLGEDAGSNPWGANGCPDRGCDNGTLAMAWGSGTAEFPYLVTPEQAIQREVISNGGNVFAVTDNGALSQMADVASQSSVSLVFVNADSGEGYISVDGNEGDRKNLTLWKNGEAVIDTVVSHCNNTIVVIHSVGPVLIDRWYDNPNVTAIIWAGLPGQESGNSLVDVLYGRVNPSAKTPFTWGKTRESYGAPLLTEPNNGNGAPQDDFNEGVFIDYRHFDKRNETPIYEFGHGLSYTTFGYSHLRVQALNSSSSAYVPTSGETKPAPTYGEIGSAADYLYPEGLKRITKFIYPWLNSTDLEDSSDDPNYGWEDSEYIPEGARDGSPQPLLKAGGAPGGNPTLYQDLVRVSATITNTGNVAGYEVPQLYVSLGGPNEPRVVLRKFDRIFLAPGEQKVWTTTLNRRDLANWDVEAQDWVITKYPKKVHVGSSSRKLPLRAPLPRVY

SEQ ID NO: 127 - protein, 796 aa, synthetic construct
MMTPTAILTAVAALLPTATWAQDNQTYANYSSQSQPDLFPRTVATIDLSFPDCENGPLSTNLVCNKSADPWARAEALISLFTLEELINNTQNTAPGVPRLGLPQYQVWNEALHGLDRANFSHSGEYSWATSFPMPILSMASFNRTLINQIASIIATQARAFNNAGRYGLDSYAPNINGFRSPLWGRGQETPGEDAFFLSSTYAYEYITGLQGGVDPEHVKIVATAKHFAGYDLENWGNVSRLGFNAIITQQDLSEYYTPQFLASARYAKTRSIMCSYNAVNGVPSCANSFFLQTLLRENFDFVDDGYVSSDCDAVYNVFNPHGYALNQSGAAADSLLAGTDIDCGQTLPWHLNESFVEGYVSRGDIEKSLTRLYSNLVRLGYFDGNNSEYRNLNWNDVVTTDAWNISYEAAVEGITLLKNDGTLPLSKKVRSIALIGPWANATVQMQGNYYGTPPYLISPLEAAKASGFTVNYAFGTNISTDSTQWFAEAIAAAKKSDVIIYAGGIDNTIEAEGQDRTDLKWPGNQLDLIEQLSQVGKPLVVLQMGGGQVDSSSLKANKNVNALVWGGYPGQSGGAALFDILTGKRAPAGRLVSTQYPAEYATQFPANDMNLRPNGSNPGQTYIWYTGTPVYEFGHGLFYTEFQESAAAGTNKTSTFDILDLFSTPHPGYEYIEQVPFINVTVDVKNVGHTPSPYTGLLFANTTAGPKPYPNKWLVGFDWLPTIQPGETAKLTIPVPLGAIAWADENGNKVVFPGNYELALNNERSVVVSFTLTGDAATLEKWPLWEQAVPGVLQQ

SEQ ID NO: 128 - protein, 763 aa, Trichoderma reesei
MMKSLAVVAALLGLATASPAAVRNQTRVEAHVEASSSTSFWYAAMDHTGQYKGYAPHAPSPGSYSVFVAVNAGDGGSLQQAIDSAGSSGNRQNEWLSSQPRVVYIPPGTYTLSQTLNMRTDTILMGDATNPPVIKAAAGFSGNYLVNGQDPSTGVSGELSFAVGLKNVVLDTTAVSATSSISALYWGVAQAAQLQNVKIVLAPSSGGKGHTGIQLGRGSTLGLADVRIENGQTGIWHNGHQQALYKSIYFYRNTVGMLISGGNTITLLNPTFDTVGTGVSNTGGSPFIGIVDATSINSGVTFSTTVYPSIVIDNLTKDTSSDVVVLRGATALGASSHVVNYSYGNTVGRNPIYGAVSGSTARPSAVAPGGRIPAVAAPNFAQNPVTDFVNVKDPGQNGGQTVKGDGSTDDSAALNKVLQFAAANNKIAYFPFGDYRVLSTLVVPVGSRLVGEAWATISGGGNLFKDASNPKPIVQVGNAGDVGVAQIQDMRFTVSDVLPGAIIVQFNAAGSKPGDVALFNSLVTVGGTRGADGLTNTCTKANSECKAAFLGLHFTESSSAYVENTWNWVADHITEGFSGGSNIAAKGGALVESTKGTWLHGLGSEHWWLYQLNLKSASNVVVSLLQSETNYDQGDNTQQVPPAPWTVDVQGWGDPDFSWCDSSARCHMGLANYVQGGSNIYYFGSASWAFFSGPGYQGCASGGYQCQDYMHVVKTTPTNLQMYGMCSKDTKVALRLGNGTDINAQDGFTGGWSPGGDVGRYTT

SEQ ID NO: 129 - protein, 325 aa, Talaromyces pinophilus
MHFLAALLAVLPLVSGSPVPEKRSGCALPSTYKWTSTGPLASPKSGLVALRDYSHVIYNGQHLVYGSTANTAGSYGSMNFGLFSDWSEMSSASQNTMSTGAVAPTIFYFAPKSVWILAYQWGPYAFSYRTSTDPSNANGWSSPQPLFTGTISGSSTGVIDQTVIGDSENMYLFFAGDNGHIYRASMPIGDFPGSFGSASTIVLSDSTNNLFEAVEVYTVEGQNQYLMIVEAIGANGRYFRSFTASSLGGTWTAQASTESNPFAGKANSGATWTNDISSGDLVRTNPDQTQTIDACNLQFLYQGRSTSSGGDYNLLPYQPGLLTLA

SEQ ID NO: 130 - protein, 634 aa, Trichoderma harazianum
MLGVVRRLGLGALAAAALSSLGSAAPANVAIRSLEERASSADRLVFCHFMIGIVGDRGSSADYDDDMQRAKAAGIDAFALNIGVDGYTDQQLGYAYDSADRNGMKVFISFDFNWWSPGNAVGVGQKIAQYASRPAQLYVDNRPFASSFAGDGLDVNALRSAAGSNVYFVPNFHPGQSSPSNIDGALNWMAWDNDGNNKAPKPGQTVTVADGDNAYKNWLGGKPYLAPVSPWFFTHFGPEVSYSKNWVFPGGPLIYNRWQQVLQQGFPMVEIVTWNDYGESHYVGPLKSKHFDDGNSKWVNDMPHDGFLDLSKPFIAAYKNRDTDISKYVQNEQLVYWYRRNLKALDCDATDTTSNRPANNGSGNYFMGRPDGWQTMDDTVYVAALLKTAGSVTVTSGGTTQTFQANAGANLFQIPASIGQQKFALTRNGQTVFSGTSLMDITNVCSCGIYNFNPYVGTIPAGFDDPLQADGLFSLTIGLHVTTCQAKPSLGTNPPVTSGPVSSLPASSTTRASSPPVSSTRVSSPPVSSPPVSRTSSPPPPPASSTPPSGQVCVAGTVADGESGNYIGLCQFSCNYGYCPPGPCKCTAFGAPISPPASNGRNGCPLPGEGDGYLGLCSFSCNHNYCPPTACQYC

SEQ ID NO: 131 - protein, 622 aa, Trichoderma reesei
MFGLVRRLGVGALVAAALSSLAAAAPANVAIRSLEERASSADRLVFCHFMIGICGDRTSSTDYDDDMQRAKAAGIDAFALNIGVDGYTDQQLNFAYDAADRAGMKVFISFDFNWWSPGNAAGVGQKIAQYASRPAQLYVDNRPFASSFAGDGLDVNTLRNAAGSNVYFVPNFHPGQSSPSTIDGALNWMAWDNDGNNKAPKPGQNVTVADGDNSYRSWLAGKPYLAPVSPWFFTHFGPEVSYSKNWVFPGGSLWYDRWQDVLRQGFEMVEIVTWNDYGESHYTGPLESRHYDDGNSKWTNDMPHDGFLDLAKPFIAAYKNRDTDVAPYIQNEQLIYWYRRNLKGLDCDATDTTSNRPANNGSGNYFMGRPDGWQTMDDTVYVVALLKSAGTVTVTSGGATQTFQGTAGANLFEVPANLGQQKFALSRNGQTVFSSTSLMDITNVCPCGIYNFNPYVGTVPAGFDDPLGPDGLASLTIGLHVTTCQAKPSLGTNPPITSGPGSSVPVSTPPGSTTRFSSTPVSSRSSSSTPPVSTPPPGQVCVAGTVADGQSGNYIGLCNFSCNFGYCPPGPCKCTAYGAPINPPATNGRNGCPLPGEDDSYLGLCSFSCNHNYCPPTACQYC

SEQ ID NO: 132 - protein, 248 aa, Salipaludibacillus agaradhaerens
MIKINKTIKILMLTLLMMSFAGAAYAHNPVTDEEVYHSFNSHDWQNWNMSDGWKNDDYFFGCHWSQNRVNFYGGQMELSLRTNYSYAPPYNYECAEYTTNNFYGYGLYEVSMKPAKVSGVISSFFTYTGPSYNGAPWDEIDIEFLGNDTTKVQFNYYTDGVGGNEILYDLGFDAADSYNTYAFDWQENYINWYVNGQLVATATENIPSNPSKIMMNIWNTYGIDEWAGRYYGEDANASYNWVRYTPNR

SEQ ID NO: 133 - protein, 414 aa, Fusarium solani
MLTSSLLTALAALASSAHAWLPTDNSHTGLNKRDVTLFTYPLQPDSNKRWLPSSNKIRGVNLGSLFVYEPWIDSQEWANTGCEGEKSEFDCVMNKGQESADNAFQEHWKRFITQEDLDEMASYGLNTIRVPLGYWLKEDLVDASEHFPKGGLDYLTQLCGWASDRGFYIILDLHGAPGAQEPNQPFTGQYAPTVGFYNDYNYGRAVEWLEWITDIIHTKNEYRNVGMLEIVNEPLNWDKAVDSLRNTYYPNAYKAIRKAEDNLKVATNDRLHIQMMGSLWGSGNPTEFLDDKSFTAFDDHRYLKWDTSVEVSQSAYIQKSCQDDRNTDGPTIVGEWSIAVPDNVEQTDAWKPQSQKDFYSKWFAAQVHAYEQHTLGWVFWTWKTNLGDDYRWSYRDAARAGVIPKDLNSLPSVC

SEQ ID NO: 134 - protein, 337 aa, Alkalihalobacillus bogoriensis
MKQQKRLYARLLTLLFALIFLLPHSAAAANSGFYVSGTTLYDANGNPFVMRGINHGHTWYKDQATTAIEGIANTGANTVRIVLSDGGQWTKDDIHTVRNLISLAEDNHLVAVLEVHDATGQDDIASLNRAVDYWIEMRSALIGKEKTVIINIANEWFGSWEGDPWARGYKQAIPRLRNAGLNHTLMVDAAGWGQFPQSIHDYGREVFNADPQRNTMFSIHMYEYAGGTARQVRTNIDGVLNQDLALVIGEFGHRHTNGDVDEATIMSYSEQRGVGWLAWSWKGNGPEFEYLDLSNDWAGNNLTAWGNTIVHGPYGIRETSRPVTVFTGGGSDGGTSP

SEQ ID NO: 135 - protein, 446 aa, Evansstolkia leycettana
QQTMWGQCGGQGWTGPTICVAGATCSTQNPWYAQCTPAPTAPTTLQTTTTTSSKSSTTTSSKSSTTTGGSGGGTTTSTSATITAAPSGNPYSGYQLYVNQEYSSEVYASAIPSLTGTLVAKASAAAEVPSFLWLDTASKVPLMGTYLQDIQAKNAAGANPPYAGQFVVYDLPDRDCAALASNGEYSIANNGVANYKAYIDSIRALLVQYSNVHVILVIEPDSLANLVTNLNVQKCANAQSAYVECINYALTQLNLKNVAMYIDAGHAGWLGWPANLSPAAQLFASVYQNASSPAAVRGLATNVANYNAWSIATCPSYTQGDPNCDEQKYINALAPLLQQQGWSSVHFITDTGRNGVQPTKQNAWGDWCNVIGTGFGVRPTTNTGDPLEDAFVWVKPGGESDGTSNSTSPRYDAHCGYSDALQPAPEAGTWFEAYFEQLLTNANPSF

SEQ ID NO: 136 - protein, 415 aa, Humicola insolens
MLPKPAALLRAMLLAAIAADAQSDKLQVDLNSPASIKKAAKLVAANLMSHYHGDEPGATPGILPGPPPAGPYYWWQAGAMWGTIVDYWHYTGDETYNAEALRSMVFQAEPPANAYMPRNWTASLGNDDQGFWGMAAMLAAETNFTNPPEDQPQWLALAQAVFNTQVPRWEMDYCNGGLRWQIVQANNGYNYKNTIAAAVFLNIASRLARYTGNDSYAEWAERAWDWMEGVGYITEDFNVKDGAHVESNCTDINPVQFSANAAILIHGVSVMYNYTSGSARDKWRYRVVGLVNRTLEHFFPDGIMVERPCELEDRMQCNTDQHSFKGYMHRALATAAVVAPFMRDTIVPVLRSSTEGCVSSCLADGTCGFRWNIGRYDGDVDHGPAGQQMSALAALSTLLIDQDRVLRGPLTNATG

SEQ ID NO: 137 - protein, 270 aa, Diaporthe sojae
MHLRSFYSAVLAAATASATKILLPLYIYPIPLDRWGSIYDAIATHPSIDFQIVINPSSGPGGSTPGYNNHWISAVSKLHAYDNVDTLGYVRVGYGAKALNDITTDITNWNGWNHYTAADITIDGIFFDETPNWQGTKGANDVSFMQQLAELADHGGYSKVFNLGQASNHDEYFSIADTVVIFENTAEWYNDTVLATAAADGVADKSAVLIHHFATSGLTSGFAVRWVVDMVRKGLGSFAIINSDWNNANSNVAPMGIGILADMLESVQGY

SEQ ID NO: 138 - protein, 332 aa, unidentified
MISVSTLALALLAAAQAVESASAGCGKNPPTSGTKSINVNGKQRQYILQLPNNYDSSKAHRVVFGYHWRDGSMNDVANGGFYGLRSLSGDSTIFIAPNGLNAGWANNGGEDITFTDQLVAMLKNDLCVNEGEFFATGWSYGGSMSHSVACSRPDVFSAVSVIAGAQLSGCSGGTTPVPYLGIHGAADNVLPISMGQQLRDKWLQTNGCTSKNAPNPGAGQQNHIKTTYSCSKAPVTWIGHGGGHVPDPTGTNGVKFAPGETWDFFNAAVGTGGGTNPGTPTTTNPGTQPTSNPGTNCSAKWGQCGGQGWAGATCCESGSTCRASNQWYSQCI

SEQ ID NO: 139 - protein, 276 aa, Trichoderma atroviride
MRSSILFAAATAGTGSLAYTIPANLQAIYNAHKAGTCATPLSGTSSSGAVFCGDIPNAIFLKGSNGNYDNMDVDCDGSDDKAGDCSNDPTGYGETAFKDTVQSYGISDLNANIHPYVVFNEPPFFNAEQHGMKPLSVMAVVCNNQVWYGIWGDTNTEPTTGEAAISLAQLCFPNEGLNGDFGHGTKDVLYIGFVGDEAVPGKNGANWKASNVSQFEASIKSLGDSLVQSLGTSSGGGGGGGSGTCSWEGHCIGASCGTDDDCSDDFVCSNGKCAAD

SEQ ID NO: 140 - protein, 336 aa, Parengyodontium album
MARLRNSILLSLAAAASSAREIPSNVRDFYDSVRNQGQCYNKLKSGFHSIQGDSGAFSYCGDHMNDYNVIYLQGNNRELANMDIDCDGIQNGPADDGRCGSSGDTQSITSFQYIVESYGTGQRDLDANVHPYVVFGNEGSKPGYATFNPENYGIEPLSVMAVVCNNKLIYGVWGDENGDDGPQAMIGEASISLATACFGYGVNGNAGYDGNDVLYIAFPGSDAVPGRSAKWSARSYDEFESSISALGDSLIQRIGGGGGGDPGNPPTTCSWPGHCEGASCGDENDCSDDLVCKSGTCTSPNVPTCSWVGHCEGASCGDENDCSDNLVCKNGQCASP

SEQ ID NO: 141 - protein, 424 aa, Trichoderma harzianum
MLSFLGKSVALLAALQATLSSASPLATEERSVEKRANGYANSVYFTNWGIYDRNFQPADLVASDVTHVIYSFMNLQADGTVISGDTYADYEKHYADDSWNDVGTNAYGCVKQLFKVKKANRGLKVLLSIGGWTWSTNFPSAASTDANRKNFAKTAITFMKDWGFDGIDIDWEYPADATQASNMILLLKEVRSQLDAYAAQYAPGYHFLLTIAAPAGKDNYSKLRLADLGQVLDYINLMAYDYAGSFSPLTGHDANLFNNPSNPNATPFNTDSAVKDYINGGVPANKIVLGMPIYGRSFQNTAGIGQTYNGVGSGSWEAGIWDYKALPKAGATVQYDSVAKGYYSYNSATKELISFDTPDMINTKVAYLKSLGLGGSMFWEASADKKGADSLIGTSHRALGGLDTTQNLLSYPNSKYDNIKNGLN

SEQ ID NO: 142 - protein, 549 aa, Penicillium vasconiae
MKGSISYQIYKGALLLSALLTSVQAQQVGTLTTETHPSLTWSQCTAGGSCSTVTGSVVIDSNWRWVHSTSGSTNCYTGNTWDATLCPDDVTCAANCALDGASYSSTYGVTTSGNSLRLNFVTTASQKNIGSRLYLLENDTTYQKFNLLNQEFTFDVDVSNLPCGLNGALYFVDMDADGGMAKYSTNKAGAKYGTGYCDSQCPRDLKFIDGQANVEGWTPSTNDPNSGIGNHGSCCAEMDIWEANSISNAVTPHPCDTPSQTMCTGDACGGTYSTSRYAGTCDPDGCDFNPYRMGDTSFYGPGLTVDTKSPFTVVTQFITNDGTSSGTLSEIKRFYVQNGKVIPQPQSTITGVTGNSITDTFCNAQKTAFGDPNVFTKHGGMAGMGAGLADGMVLVMSLWDDHAADMLWLDSTYPTDADPTTPGVKRGTCDISSGDPTTVESTYPNAYVIYSNIKTGPLNSTFTGTTSGTTSSSTTTTSTTTTSKTSSTTTTTTSKTSSTSSTSTTTSTGSSTTGAAHWAQCGGIGWTGATTCVSPYTCTKQNDYYSQCL

SEQ ID NO: 143 - protein, 532 aa, Evansstolkia leycettana
MASLFSFKMYKAALVLSSLLAATQAQQAGTLTTETHPSLTWQQCSAGGSCTTQNGKVVIDANWRWVHSTSGSNNCYTGNTWDATLCPDDVTCAANCALDGADYSGTYGVTTSGNSLRLNFVTQASQKNVGSRLYLMENDTTYQIFKLLNQEFTFDVDVSNLPCGLNGALYLVAMDADGGMAKYPTNKAGAKYGTGYCDSQCPRDLKFINGEANVEGWQPSSNDPNSGIGNHGSCCAEMDIWEANSISNAVTPHPCDTPGQVMCTGNNCGGTYSTTRYAGTCDPDGCDFNPYRMGNHSFYGPKQIVDTSSKFTVVTQFLTDDGTSTGTLSEIRRFYVQNGQVIPNSVSTISGVSGNSITTEFCTAQKQAFGDTDDFSKHGGLSGMSAALSQGMVLVMSLWDDHAANMLWLDSTYPTNATSSTPGAARGTCDISSGVPADVESNDPNAYVVYSNIKVGPIGSTFSSSGSGSSSSSSTTTTTTASPTTTTSSASSTGTGVAQHWGQCGGQGWTGPTTCVSPYTCQELNPYYYQCL

SEQ ID NO: 144 - protein, 413 aa, Geobacillus stearothermophilus
AELEGLDESAAQVMATYVWNLGYDGSGITIGIIDTGIDASHPDLQGKVIGWVDFVNGRSYPYDDHGHGTHVASIAAGTGAASNGKYKGMAPGAKLAGIKVLGADGSGSISTIIKGVEWAVDNKDKYGIKVINLSLGSSQSSDGTDALSQAVNAAWDAGLVVVVAAGNSGPNKYTIGSPAAASKVITVGAVDKYDVITSFSSRGPTADGRLKPEVVAPGNWIIAARASGTSMGQPINDYYTAAPGTSMATPHVAGIAALLLQAHPSWTPDKVKTALIETADIVKPDEIADIAYGAGRVNAYKAINYDNYAKLVFTGYVANKGSQTHQFVISGASFVTATLYWDNANSDLDLYLYDPNGNQVDYSYTAYYDFEKVGYYNPTDGTWTIKVVSYSGSANYQVDVVSDGSLSQPGSLP

SEQ ID NO: 145 - protein, 311 aa, Bacillus sp.
AVPSTQTPWGIKSIYNDQSITKTTGGKGIKVAVLDTGVYTSHLDLAGSAEQCKDFTQSNPLVDGSCTDRQGHGTHVAGTVLAHGGSNGQGVYGVAPQAKLWAYKVLGDKGEGYSDDIAAAIRHVADEASRTGSKVVINMSLGSSAKDSLIASAVDYAYGKGVLIVAAAGNEGPKPNTIGYPAGFVNAVAVAALENVQEKGTYRVADFSSRGNPATAGDYIIQERDIEVSAPGASVESTWYTGGYNTISGTSMATPHVAGLAAKIWSANTSLSHSQLRTELQNRAKVYDIKGGIGAGPGDDYASGFGYPRVK

SEQ ID NO: 146 - protein, 469 aa, Acremonium exiguum
MHLSICSLLCFILAGAAQVMGGELTSPATDNTIVLSRPRFAATTLEKRAECGPGIGSCDPGFCCSESGNCGKDEDFCDGSSCQLDYSDSCDTFSRPPGSSTEEVDRPEIGDIPYGSIITDCTTPGLMALTFDDGPWIYTEEILDLLDELEVTATFFIAGNNRGKGHIDDESTDWPDMLRRMHDAGHQLASHTWTHRSLDVVNSTIRKTEIVYNEMAFRNILGFFPTYMRPPYLECGSACQSLLRDLGYHIITINIDTKDYENDAPELIQISKDRFSNGVSTDSDTHEYIELSHDVHEQTVHNLTQFMVNVSRNRGYKLVTVGECLGDPKENWYRSAGGAGSATTTAASTNTKTTTRELPTESIAISPDQTCGGDTGYTCQGSKFGNCCSHYGYCGSGPAYCGTGCDVDFGSCSPGSGGTSDTTNGLCGPLVDATCINYGSKTCCSSSGYCGNTVAYCGSGCQSDYGDCN

SEQ ID NO: 147 - protein, 528 aa, Trichoderma harzianum
MKHLKVAIGVIALVITQTAAVPQASIAAENTLCGPGLGKCVGGCCSEFGHCGTTTQYCSGSQCQLDYSDSCDTQVGPGGRSTENIDRPFFGDVPYAETITECDSPGLVALTFDDGPYEYTNQLLDLLDEYKVKATFFIAGHNRGKGRIDDDSTGYPRVLRRMRNAGHQLASHTWTHRNLNGVSEHVQRTEMIYNEMAFRNIFGFVPTYMRPPFLECGSSSGCIDTMEELGYHVISTNLDTKDYENDDPVLIQKSKDKFFSMQSSDETDHSYIVLAHDVHYQTVVTLAKYMIETSRERGYKLVTVGECLGDPPENWYRVAPSRRGLDTNHQIPPVNDTYGELPPVNNDTNPELPPVNNDTNPWTPPGNSTNPWTPPENSTNPWTPPENNTNPWTPPINNPDPVEPPKLNVSTDQRCGVNYGGTTCKGSLFGDCCSFFGYCGRSDEYCSTSCDRNYGECNLPLGDDKVQAPIHNTTNGLCGRDHAATCLHFSKKHCCSQYGYCGNSTAHCGEGCQKGYGLCLSAGSFIGV

SEQ ID NO: 148 - protein, 378 aa, Aspergillus oryzae
MGVNFKVLALSALATISHASPLLYPRATDSNVTYVFTNPNGLNFTQMNTTLPNVTIFATGGTIAGSSADNTATTGYKAGAVGIQTLIDAVPEMLNVANVAGVQVTNVGSPDITSDILLRLSKQINEVVCNDPTMAGAVVTHGTDTLEESAFFLDATVNCRKPVVIVGAMRPSTAISADGPLNLLQSVTVAASPKARDRGALIVMNDRIVSAFYASKTNANTVDTFKAIEMGNLGEVVSNKPYFFYPPVKPTGKTEVDIRNITSIPRVDILYSYEDMHNDTLYSAIDNGAKGIVIAGSGSGSVSTPFSAAMEDITTKHNIPIVASTRTGNGEVPSSAESSQIASGYLNPAKSRVLLGLLLAQGKSIEEMRAVFERIGVA

SEQ ID NO: 149 - protein, 494 aa, Bacillus licheniformis
MKLIKNASFIISFLAAAGIYFLLGTVAASAANEDYPEQMIRLESSSGLNITPAGNQDNAPLTAKQTSGEKEERWRLDTSDGKQFKIRNMDSGKIIIPAHYALSDNNPAVVYYDNSRKEELWNIIGADKDGNGDFITYKIVSAQNSSLALTLDGSGVKLAKYTGSSVQKWKLPSDGLEGFAGYARETNGKQKTGTTGGLLGKVVYVNNLGELKANIEDSTPRTIVVSSNIGASAKTVLTVGANKTIIGSYEKHKLNNIYFKTKADSGNVIFKNLVIAHDASINENNDIPVYITDSRNYWIDHVTFQGHSYTANGHDLDKLLYVGAKADYVTLSHSTFTDHRYGLILGWPQDDKQYHSIYNGYPRMTISHNRFENLYVRAPGLMRYGYYHVKSNYINNYHLGFTITTLAKIYSEANYFGTGNEKGILDDYGDGAFKDVGSYPAIKGQKSPETSWTPSSNYSYRTMKAGNAKAFAKRYAGAQRTALYYANYSQFKKD

SEQ ID NO: 150 - protein, 727 aa, Trichoderma harzianum; identical to SEQ ID NO: 32

SEQ ID NO: 151 - DNA, 926 bp, Penicillium emersonii
  source 1..926: mol_type = genomic DNA
atcatggatatataaacgtcaagataagctgaggtgatccaagtcctgcattctgataatatgctgtcttcgacgactcgcaccctcgcctttacaggccttgcgggccttctgtccgctcccctggtcaaggcccatggctttgtccagggcattgtcatcggtgaccaattctacagcgggtacatcgtcaactcgttcccctacgaatccaacccaccccccgtcatcggctgggccacgaccgccaccgacctgggcttcgtcgacggcacaggataccaaggcccggacatcatctgccaccggaatgcgacgcccgcgccgctgacagcccccgtggccgccggcggcaccgtcgagctgcagtggacgccgtggccggacagccaccacggacccgtcatcacctacctggcgccgtgcaacggcaactgctcgaccgtcgacaagacgacgctggagttcttcaagatcgaccagcagggcctgatcgacgacacgagcccgccgggcacctgggcgtcggacaacctcatcgccaacaacaatagctggaccgtcaccattcccaacagcgtcgcccccggcaactacgtcctgcgccacgagatcatcgccctgcactcggccaacaacaaggacggcgcccagaactacccccagtgcatcaacatcgaggtcacgggcggcggctccgacgcgcctgagggtactctgggcgaggatctctaccatgacaccgacccgggcattctggtcgacatttacgagcccattgcgacgtataccattccggggccgcctgagccgacgttctagaagaagtcgggaggaggggcaggtatcagggcgcgaggctgtatgtcaacaatcagctaacgtgtgtcctctgccgcttgggtgtcgatcatctacctgtgttg

SEQ ID NO: 152 - DNA, 747 bp, Thermoascus aurantiacus
  source 1..747: mol_type = unassigned DNA
atgtctttttctaaaattattgctactgctggtgttttagcttctgcttctttagttgctggtcatggttttgttcaaaatattgttattgatggtaaaaattatggtggttatttagttaatcaatatccttatatgtctaatcctcctgaagttattgcttggtctactactgctactgatttaggttttgttgatggtactggttatcaaactcctgatattatttgtcatcgtggtgctaaacctggtgctttaactgctcctgtttctcctggtggtactgttgaattacaatggactccttggcctgattctcatcatggtcctgttattaattatttagctccttgtaatggtgattgttctactgttgataaaactcaattagaattttttaaaattgctgaatctggtttaattaatgatgataatcctcctggtatttgggcttctgataatttaattgctgctaataattcttggactgttactattcctactactattgctcctggtaattatgttttacgtcatgaaattattgctttacattctgctcaaaatcaagatggtgctcaaaattatcctcaatgtattaatttacaagttactggtggtggttctgataatcctgctggtactttaggtactgctttatatcatgatactgatcctggtattttaattaatatttatcaaaaattatcttcttatattattcctggtcctcctttatatactggt

SEQ ID NO: 153 - DNA, 876 bp, Thermomyces lanuginosus
  source 1..876: mol_type = genomic DNA
atgaggagctcccttgtgctgttctttgtctctgcgtggacggccttggccagtcctattcgtcgagaggtctcgcaggatctgtttaaccagttcaatctctttgcacagtattctgcagccgcatactgcggaaaaaacaatgatgccccagctggtacaaacattacgtgcacgggaaatgcctgccccgaggtagagaaggcggatgcaacgtttctctactcgtttgaagactctggagtgggcgatgtcaccggcttccttgctctcgacaacacgaacaaattgatcgtcctctctttccgtggctctcgttccatagagaactggatcgggaatcttaacttcgacttgaaagaaataaatgacatttgctccggctgcaggggacatgacggcttcacttcgtcctggaggtctgtagccgatacgttaaggcagaaggtggaggatgctgtgagggagcatcccgactatcgcgtggtgtttaccggacatagcttgggtggtgcattggcaactgttgccggagcagacctgcgtggaaatgggtatgatatcgacgtgttttcatatggcgccccccgagtcggaaacagggcttttgcagaattcctgaccgtacagaccggcggaacactctaccgcattacccacaccaatgatattgtccctagactcccgccgcgcgaattcggttacagccattctagcccagagtactggatcaaatctggaacccttgtccccgtcacccgaaacgatatcgtgaagatagaaggcatcgatgccaccggcggcaataaccagcctaacattccggatatccctgcgcacctatggtacttcgggttaattgggacatgtctttag

SEQ ID NO: 154 - DNA, 807 bp, Thermomyces lanuginosus
  source 1..807: mol_type = unassigned DNA
gaagtttctcaagatttatttaatcaatttaatttatttgctcaatattctgctgctgcttattgtggtaaaaataatcgtgctcctgctggtactaatattacttgtactggtaatgcttgtcctgaagttgaaaaagctgatgctacttttttatattcttttgaagattctggtgttggtgatgttactggttttttagctttagataatactaataaattaattgttttatcttttcgtggttctcgttctattgaaaattggattaataatttacgttttgatttaaaagaaattaatgatatttgttctggttgtcgtggtcatgctggttttacttcttcttggcgttctgttgctgatactttacgtcaaaaagttgaagatgctgttcgtgaacatcctgattatcgtgttgtttttactggtcattctttaggtggtgctttagctactgttgctggtgctgatttacgtggtaatggttatgatattgatgttttttcttatggtgctcctcgtgttggtaatcgtgcttttgctgaatttttaactgttcaaactggtggtactttatatcgtattactcatactaatgatattgttcctcgtttacctcctcgtgaatttggttattctcatccttctcctgaatattggattaaatctggtactggtgttcctgttactcgtaatgatattgttaaaattgaaggtattgatgctactggtggtaataatcaacctaatattcctgatattactgctcatttatggtattttggtttaattggtacttgttta

SEQ ID NO: 155 - DNA, 582 bp, Humicola insolens
  source 1..582: mol_type = unassigned DNA
caattaggtgctattcaaaatgatttagaatctggttctcctgatgcttgtcctgatgctattttaatttttgctcgtggttctactgaacctggtaatatgggtattactgttggtcctgctttagctaatggtttaaaagaacatattcctaatatttggattcaaggtgttggtggtccttatgatgctgctttagctactaattttttacctcgtggtacttctcaagctaatattgatgaaggtaaacgtttatttcatttagctcatcaaaaatgtcctaatactcctgttgttgctggtggttattctcaaggtgctgctttaattgctgctgctgtttctgaattatctggtgctgttaaagaacaagttaaaggtgttgttttatttggttatactcaaaatttacaaaatcgtggtggtattcctaattatcctcgtgaacgtactaaagttttttgtaatgttggtgatgctgtttgtactggtactttaattattactcctgctcatttatcttatactattcaagctcgtggtgaagctgctcgttttttagttgatcgtattcgtgct

SEQ ID NO: 156 - DNA, 822 bp, Thermomyces lanuginosus
  source 1..822: mol_type = unassigned DNA
tctcctattcgtcgtgaagtttctcaagatttatttaatcaatttaatttatttgctcaatattctgctgctgcttattgtggtaaaaataatgatgctcctgctggtactaatattacttgtactggtaatgcttgtcctgaagttgaaaaagctgatgctacttttttatattcttttgaagattctggtgttggtgatgttactggttttttagctttagataatactaataaattaattgttttatcttttcgtggttctcgttctattgaaaattggattggtaatttaaattttgatttaaaagaaattaatgatatttgttctggttgtcgtggtcatgatggttttacttcttcttggcgttctgttgctgatactttacgtcaaaaagttgaagatgctgttcgtgaacatcctgattatcgtgttgtttttactggtcattctttaggtggtgctttagctactgttgctggtgctgatttacgtggtaatggttatgatattgatgttttttcttatggtgctcctcgtgttggtaatcgtgcttttgctgaatttttaactgttcaaactggtggtactttatatcgtattactcatactaatgatattgttcctcgtttacctcctcgtgaatttggttattctcattcttctcctgaatattggattaaatctggtactttagttcctgttcgtcgtcgtgatattgttaaaattgaaggtattgatgctactggtggtaataatcaacctaatattcctgatattcctgctcatttatggtattttggtttaattggtacttgttta

SEQ ID NO: 157 - DNA, 3613 bp, Aspergillus niger
  source 1..3613: mol_type = genomic DNA
atcagcattccgttccaatcacgatggcgcatagtaaagtgtcatgcaggtgcaggaaaaatactcacccttatcaaggtaatcctcctggccctggtttccgctggagcccgagccctgcgcatcaccaccggacttgttgccaccaccgagcttcgaggcgagaccggagagtttgtccatgttgatgtgttttaaattgagtgatttcgtttaggagtgatagagaagagtgtgaatgtttgtaaggaacaggaatgtccatgcaagggatggaagttacatatgttttataccttggagggagtgcttagtgatagactctggaacaggagttggtgatgtcatggacgggatctccgtctttatttgcatcaccgagtctttacttgagattcaatcgacggcagatgtagatcttgtgaagtggttaatcatcagctatgcacataaattcgcataattctctgcgatgaaatcagttggttgacagtcacgtgaatgacacccgtcatgatgtcagcattcccctgcttatgtcatccatgttcgtctctgatgtcagatcacgtgaaatcagccaccgcatccgtattcgtatcccctgcatttatcctttggtttgtgctgctcgtttgttcgttccctctttctgtctgacaggttggttccctgtcgagtggtctgtcacgttgcacaccggaaccagatgtggaatgtttcctcggaaatcatggcggcactgcaggccatgcgcgtttgtatcactcatcctggcacctgcagataaacagtagtcgatgtcatatcaccccatttctgggaaaattctcacacccctcgatcaaagcaaaccaagatttcgctgcccgaaaaatgcgattcagcctggtcggcccccacggaacccagttccttcggaaggatcagtggcgcaggggcaatcttgctgcctaggatgaagtggttccagggacagcaaacctcctggatggggctgttcccttactcttgggcctatcaagggtccctcagaccgagggatggccctaaacattcctgccgaactccggctagagccgctgactgtactctgtacagaaactctggttcacatggtggatttgccaaggctgcccaaagccttccggacgatccgcaagatgtggctgttctcccgagatgatattattataaggcattctttgcgctgattccttctcgcaacctttttcccttactcgtgccgtccctccacccccagtccctccctccgcgatcgtcgtccctgtcgatcatgaagttgcctctctttgctgctgcagcagctggcctcgccaatgccgcttccctgcctgtcgaaagggccgaggctgaggttgcgtccgtcgccgccgatttaatcgtccgcgccctccccaatgcccccgatggctacactccctccaatgtcacctgtccctcgactcgtccgagcattcgtgatgcctcgggcatctccaccaacgagaccgagtggctcaaggtccgtcgcaatgcgaccctcaccccgatgaagaacctccttagccgtctcaacctcaccggctttgataccacctcctacatcaatgaacactccagcaacatctccaacatccccaacattgcaattgcggcttcgggtggtggataccgtgcgctcaccaacggagctggtgcgctgaaggctttcgacagccgctccgacaatgccaccaactccggtcaactgggtggtctgctgcaggcggcaacctacgtctctggtctgagtggtggtagctggctggtcggatccatgttcgtcaacaacttctcctccatcggtgaattgcaagccagcgagaaggtctggcgcttcgacaagtccctgctcgagggacccaacttcgaccacatccagatcgtcagcacggtggaatactggaaggacattaccgaggaagtcgacggcaaggctaacgctggttttaacacttccttcaccgactactggggccgtgcgctgtcctaccagctggtgaacgcctccgatgacaagggtggtcccgactacacctggtcctccattgcgctcatggacgacttcaagaacggccagtaccccatgcctattgtggtcgccgacggccgcaaccccggcgaaatcatcgttgagaccaatgccaccgtttatgaagtgaacccttgggaattcggctctttcgaccccagcgtctacgccttcgctcccctgcagtatctgggctcccggttcgagaacggctccatcccggacaacggcacctgcgtgagcggcttcgacaatgccggctttatcatgggatcatcctccaccctgttcaaccaattcctcctccaaatcaacagcaccagcatccccacgatcctgaaggatgccttcactgacatcctcgaggacctcggtgagcgcaacgacgatatcgccgtctactcccccaaccccttctccggctaccgcgacagcagcgaggattacgccacagccaaggacctcgacgttgtcgacggtggtgaagacggcgagaacatccctctgcacccgctgatccagcccgagcgtgccgtcgatgtcatcttcgccatcgactcctctgccgacacagactactactggcccaacggtacctcccttgtcgcgacctacgagcgcagtctcgagcccagcatcgccaacggcaccgccttccccgccgtgccggatcagaacaccttcgtcaacctgggtctcaactcccgcccgactttcttcggctgcgaccccaagaacatctccggcaccgcccccctggtcatttatctgcctaacagcccctacacctacgactccaacttctcgaccttcaagctgacctacagcgacgaggagcgtgattccgtcatcaccaacggctggaacgtggtcactcgcggtaacggtaccgttgatgataacttcccgtcttgcgtggcgtgcgctattctccaagcgctccactacaggacgaacacctctctgccagatatctgtaccacctgctttaacgattactgctggaacggcacgacaaacagcactacgcctggagcttatgaacccagtgtgctgattgctactagcggtgcgatcaagagtgtcttggattactcggtgctggcgctcgccatgggtgttgctgcgtttatgctgtagatatgatggttgcataaggggttgtacattgtgttattttagatattttatgcatatagtcatgtttgcattgtttagttagtttgatgaagataccgacatagattgtgttcattagcaatgacatgacataacaatgtgaagcgaagtaagaacagattgcctgaggcactaaggtgtctgggcttattattccagtcacttttgcacactcacagctactgaatcacgtcgttgctagaacaaaaagttactacggccaaggcagcaaggttgcgatttcaaatgttgtcgacttgattgctcagtatgtagcttttagaatctggggatatttctagcaaactgcacagggttcactgaagccgtcagctaagatgcctgggatccaagggtttt

SEQ ID NO: 158 - DNA, 1195 bp, Aspergillus aculeatus
  source 1..1195: mol_type = genomic DNA
agtcgatcatacactcatatcaatcgcaaaaatggttaaatcagtcttggcttccgctctcttcgccgtgtccgcactggctgccagccgtaccacggctccctccggcgcgatcgtcgtcgccaagtctggtggtgactataccactattggtgatgccattgatgctctgagcaccagcaccaccgacacccaaaccattttcatcgaggagggtacctacgatgagcaggtctacctgcctgctatgaccggcaaggtcatcatctacggtcaaaccgagaacaccgactcctacgccgacaacctggtcaccatcacccacgccatcagctacgaggatgctggtgagagcgatgatctgactgctaccttccgcaacaaggctgtcggctctcaggtctacaacctcaacattgccaacacctgtggtcaggcttgccaccaggctttggccttgtccgcctgggctgaccagcagggttactacggctgcaacttcactggttaccaggataccctcctcgctcagaccggtaaccagctctacatcaactcctacattgagggtgctgtcgacttcatctttggccagcacgctcgtgcttggttccagaacgtcgacatccgtgtcgttgagggtcctacctctgcctccatcaccgccaacggccgctcctccgagactgacacctcctactacgtgatcaacaagtcgaccgttgctgctaaggagggcgacgacgttgccgaaggcacctactaccttggccgcccctggtccgagtacgcccgtgtcgtcttccagcagaccagcatgaccaacgtcatcaactccctcggctggactgagtggtccacctccacccctaacaccgagtacgtcaccttcggcgagtacgccaacaccggcgccggctccgagggcacccgcgccagcttcgccgagaagctggatgccaagctcaccatcacggatatcctgggctctgactacaccagctgggtcgatacctcctacttctaagctggacgcatgagtagttgttaagaatgcgtgagatggctgtcaaccaacagcagagctgaccgtatgcggtgcatatacttttctcttcgtcaaataatttccctttgataaagcaatttaattggcatgcacagtccatgcttgacacaaaaaaaaaaaaaaaaa

SEQ ID NO: 159 - DNA, 11562 bp, Valsaria rubricosa
  source 1..11562: mol_type = genomic DNA
ttaagcaaggattttcttaacttcttcggcgacagcatcaccgacttcggtggtactgttggaaccacctaaatcaccagttctgatacctgcatccaaaacctttttaactgcatcttcaatggccttaccttcttcaggcaagttcaatgacaatttcaacatcattgcagcagacaagatagtggcgatagggttgaccttattctttggcaaatctggagcagaaccgtggcatggttcgtacaaaccaaatgcggtgttcttgtctggcaaagaggccaaggacgcagatggcaacaaacccaaggaacctgggataacggaggcttcatcggagatgatatcaccaaacatgttgctggtgattataataccatttaggtgggttgggttcttaactaggatcatggcggcagaatcaatcaattgatgttgaaccttcaatgtagggaattcgttcttgatggtttcctccacagtttttctccataatcttgaagaggccaaaacattagctttatccaaggaccaaataggcaatggtggctcatgttgtagggccatgaaagcggccattcttgtgattctttgcacttctggaacggtgtattgttcactatcccaagcgacaccatcaccatcgtcttcctttctcttaccaaagtaaatacctcccactaattctctgacaacaacgaagtcagtacctttagcaaattgtggcttgattggagataagtctaaaagagagtcggatgcaaagttacatggtcttaagttggcgtacaattgaagttctttacggatttttagtaaaccttgttcaggtctaacactgccggtaccccatttaggaccacccacagcacctaacaaaacggcatcagccttcttggaggcttccagcgcctcatctggaagtggaacacctgtagcatcgatagcagcaccaccaattaaatgattttcgaaatcgaacttgacattggaacgaacatcagaaatagctttaagaaccttaatggcttcggctgtgatttcttgaccaacgtggtcacctggcaaaacgacgatcttcttaggggcagacatactcttcctttttcaatattattgaagcatttatcagggttattgtctcatgagcggatacatatttgaatgtataaactagtgcatgcaagcttattagtgataccccactctaagaaaatagaccaatctccagctgcaccttcagacactccggtacaaattctcgtctatgttggagattgttgtgactttgaaacatgacccttgaccctgattttgaatttgtccatatatcgaggcaggtgtcttattcgtacggagagggtatctgtcgtagacacatagtagtagtcatttcgagtgctgaatttataaatcgcatcatacttgcgacatactgccataaaaggagtacgtatccaccactacttattgcgcaccaacacgcttcaggtatgcatcccatccctccttctggtactgcttcgccgcctccacgggatcaggagcagcataaattccacggccagcaataataaagtcggcaccgcgtccaacagccgactcaggagtttggtactgctgtcccagcttgtcacccttcgaggagaggttgacacctgtcgtgaagacgacaaaatcttcctcctccgaaggcgagctaacttcagactgaacctcgccaaggtgacgtgtcgagacgaatcccatcacaaacttcttatacttccgagcatagtcaacagaagaagtagtatattgaccggtagccaaagatcccttggaggtcatctccgcaaggatcaaaaggcccctctcggagccgtaggggaagtcctcggccgaagcagtctgggccagagcctcgacgataccctcaccgggcagaatactgcagttgatgatgtgggcccactcagagatacgcagagtgccgccatggtactgcttttggactgtgtttccgatatcgatgaacttgcgatcttcgaagatgaggaaattgtgcttctctgcaagggccttcagaccggtgatggtttcttcgctgaaatcggagaggatatcgatgtgagttttgatcacggcaatgtacggaccgagtcctgttatataatccaccattaaccattactagatcacatgtaagtggcatccccggtgcgcatacggtcagccaaatccagcagctctttggtggttgtcacgtcggcggaaacggtgacattggttttcttggcctcggcaacctcgaagagcttctttacgagcgcattggggtgcttgctagcgcgtgcgctgtaggtcaattgcgacttggaagacatggtgccgcggcaatgaggatcatctgttagccattccatcaacaggaagaacgagagaaggcatgatccttttcgctggtattatccagatcaagttttagccgtataatctcagaacgaacccagtccatcgatgccatgtccttctagactaggatcctagagtctagggcccagcttagggagggcatgtgaatgcatcgatgactgggaacgaacaccggcccacgccaaagacgttacctaagataccttgatcattgtgagagtccagccaaaagtattccatgacttccatcgtatgccctctagagggctaatcgaggagtgtatttacattgtcggttggtttgggaactatagaagatggtcagttattccaatcaccaaaggtttatcgaagggaggaagacttgttcagtttcgtccgaggacttttggaattcaaatctgagatagagaattgtgtgggatgagaggaaaaggaagaagatggtggggttcagaaggaggggttgagttaaatagcatgggttgagtcaacgtgataagggcactataccgtatagatcagcggcacccgattctatccgttccttttgctcctctttagctttgaccggtgagccggacaagaaacaagtgaaatcatcctgacatcggcggacgatctcctagcttttacatttcgttaccaatgggatcccgtaatcaattgcccgtctgtcagatcgaggaatggtggatcatctgatccactatataacatagtactctgtccacggttagttaacatttatccaaaaacagaaaatctccacgactggaaccttttcaatagtgaaacctaagtattagcaaataatcgttacccccactcgcactccataatccttgatccagttctttttctttccgactttctcgactttctccgccctttcctgtaagctgtcaagagagaacgcggcgacagccacatcgttgttgcatttcactttgagacgcagcatatcgcactcgtctttcttcttcacaatggattcccattcagtttccaatcggatcctccaatgcatgtccgacacgcggccggatggatgcacgtctccaattagggtcgctacccgacccaagtactgacaccaccatgcctcctgcttagagacacaccggctcaattgccggtgaaattcttcatcggtgggtgcaaggtcccctgcccagcgctcacagagtatcaaggcaatcagggcacgttcggtgtgtgatagtgtatttaccgaaggcgcgccttccgttaaattgccgtcgtcagccgttaaattaccgattaatcccgataaatttccgagatctccgttaaattgccgttcgcagccgttaaattaccggggacgaccgataaatttccgcgatgaattcatggtgttttgatcattttaaatttttatatggcgggtggtgggcaactcgcttgcgcgggcaactcgcttaccgattacgttagggctgatatttacgtaaaaatcgtcaagggatgcaagaccaaaccgttaaatttccggagtcaacagcatccaagcccaagtccttcacggagaaaccccagcgtccacatcacgagcgaaggaccacctctaggcatcggacgcaccatccaattagaagcagcaaagcgaaacagcccaagaaaaaggtcggcccgtcggccttttctgcaacgctgatcacgggcagcgatccaaccaacaccctccagagtgactaggggcggaaatttatcgggattaatttccactcaaccacaaatcacagtcgtccccggtaatttaacggctgcagacggcaatttaacggcttctgcgaatcgcttggattccccgcccctggccgtagagcttaaagtatgtcccttgtcgatgcgatgtatcacaacatataaatactagcaagggataccatacttggaggatagcaaccgacaacatcacatcaagctctcccttctctgaacaataaaccccacagaaggcatttcaccatgaagttcttcaccaccatcctcagcaccgccagccttgttgctgctctccccgccgctgttgactcgaaccataccccggccgctcctgaacttgttgcccggctgccacttgaaagaagaggtatggacgaactatcctagcgatcagtgtgtctattttgcctaacctagcaaagctatatccgcggatctcctggcaaccttcagcctcttcgagcagttcgcagccgcagcatattgtccggataacaacgacagtcccgacaccaagcttacttgctctgtcggaaactgcccgcttgtcgaagctgacacgaccagcacggtcactgaattcgaaaagtacatcttacacgaccccgttcacctacagacaaagtcccagctaacgtccacctctatctctgtccctttagctcgctcgaaaccgacgtcactggctacgtcgcgactgacagcacacgagagctcatcgttgtggcattccgcgggagttcctcgatccggaactggatcgccgacatcgactttcccttcaccgacaccgacctctgcgatggctgccaggcagcctcgggcttctggacgtcctggacggaggcacggacaggggtgctggcggcggtggcgagcgctgccgcggccaacccgtcctataccgttgccgtgacgggccacagcctcggcggggccgtggccgcgctggccgctggcgccctccggaacgcgggctacacggtcgcgctatacagcttcggagcgcctcgcgtgggtgacgagaccctcagcgagtacatcactgcgcaggcgggtggaaactaccgcatcacgcacctcaacgacccagtgccgaagctgcccccgctgctcctggggtatcgccacatcagcccggaatactacatcagcagcgggaacaacgtgaccgtgacggcggatgacgtggaggagtacaccggcacgatcaacctgagtgggaacacgggcgatctgacgttcgacacggatgcgcacagttggtacttcaacgagatcggggcatgcgatgatggtgaggctttggagtggaagaagcggggggtagaagttcagtgggttaaacgagccgctgttgactcgaaccataccccggccgctcctgaacttgttgcccggcgattgcctttggaaaggagggcgatttccgcagacctcctcgcgaccttctccttgttcgaacagttcgcagcagcagcctactgtcccgacaacaacgactcccctgatactaagttgacatgttcggtcggcaactgtcctttggtcgaagccgacacaacatcgaccgtgacagagttcgagaactccctcgagacagacgtcacgggttatgtggcaaccgattccacgcgtgagctcatcgtcgtcgccttcaggggatcctcgtccatccggaactggattgccgacatcgatttccccttcaccgataccgatctctgtgatggttgtcaggcagcatcgggcttctggacctcgtggacagaagcccgaacaggtgtgctcgcagccgtggcgtccgcagcagcagcgaacccctcctacacggtggcagtgacaggccattcgttgggtggtgcggtcgcagccctcgcagcaggtgccttgaggaacgcaggctacacagtggcgttgtactccttcggtgcacctcgggtcggcgacgagacattgtcggagtatatcactgcgcaggcaggtggcaactacaggattactcacctcaacgacccggtccctaagctccctccgttgctcttgggctatcgacacatttcgcctgagtattacatctcgtccggcaacaacgtcacggtgacagccgatgatgtggaggagtacactggaacaatcaacttgtcgggtaacacaggcgatttgaccttcgacacagacgcccactcgtggtatttcaacgagattggtgcgtgtgatgatggcgaggcattggaatggaagaaacgcggagtcgaagtgcagtgggtctaaaaatggtgatcgacacctggcggtagacaatcaatccatttcgctatagttaaaggatggggatgagggcaattggttatatgatcatgtatgtagtgggtgtgcataatagtagtgaaatggaagccaagtcatgtgattgtaatcgaccgacggaattgaggatatccggaaatacagacaccgtgaaagccatggtctttccttcgtgtagaagaccagacagacagtccctgatttacccttgcacaaagcactagaaaattagcattccatccttctctgcttgctctgctgatatcactgtcattcaatgcatagccatgagctcatcttagatccaagcacgtaattccatagccgaggtccacagtggagcagcaacattccccatcattgctttccccaggggcctcccaacgactaaatcaagagtatatctctaccgtccaatagatcgtcttcgcttcaaaatctttgacaattccaagagggtccccatccatcaaacccagttcaataatagccgagatgcatggtggagtcaattaggcagtattgctggaatgtcggggccagttggcccggtggtcattggccgcctgtgatgccatctgccactaaatccgatcattgatccaccgcccacgaggcgcgtctttgctttttgcgcggcgtccaggttcaactctctcttaattaattggcggtgatattgatggcacgatagaagcagcacattctgtccctagacttagagattatcatgaagatattctcgatcaaatgctttttgcgctctttctcagcaaaagacatgctgatgcagcgaagctgctggaaagtattttcggtacgattttgacatttgctccattgtcgaggatggatggaacgagcggcgtgcgccacgaaagtgaggctattgcctatcagctctttgctacattccggaaacaaacatccctttttgtgaattatctacgcaacttagatggcgtgaacgcatcttcaaagtctttcggcaggtccggcacgacttttgcatccagagaagcgcctacatgtgtattcgaccacctcctagcgcgcttggatatgaggaaatattactgagagtcgaaaacaagctccaccgcaccagctcttcttggagttttatattaaagaatattcccagctcgttgtattattctttttctaccgtgctaatgtatcaaggactttggtacctattaacgttattattcgtgtgctattcccaaacataaccctgtatatgtttcgaacgccgttatgacccatgtcttacatactcattaagtcattcccttggataatcccaatttagaagaagtgaaggtctgattctttccatccttccgccaacagtatcctccgagccgattcttccatggctggcggaccacaaatcaggaccatactctcatcttctggagccgcgtactcctttaggagctcttcggatatgcgtcctcggcggccagtccatgagtccggcgctttggatagggtgtgtattatattacaccttctgctgtcggttgccatgaagccgtcgagctcagcccggcaaaggatatcttcctcctgtctgtttccattgaggactgtacaagaggtgggatcttgccggtcctgaaccacggcgcgcaagacctggaagatcggtgtgataccggttcctccacaaatcatcttaaacgaccgaacatggcgttccttcccacttatgacaactcgtccatttccaaggtattcgaatctgcctgtcggacccttgcattccaccacggagcccaatggcagcctatccagggccatcgtcatcttgccgcctgccgaggtggctgttgcaaagtatactttaaccagcaagtccacggtccctttctggctggtttcagaaattggggtgtatgagcggatgatggcttcgttgttggatgatgtgtcgaggactttgatcataagatgctggccgactggtaaacccaatgtttgatcttcgtgttccaatttgaaactaaatattcgtgtatcccaggatatgtctttcctttctttcaatgttgcctttgtccaagaccgtgattggaggaacactgggcgaatttcatcggtggaggatgatgcatcatccttgagtgcttttaaaccttccgggtccatcgttccaatatggtactcaggcatcatcgcctttgccgtctcgctatctatggataggtgtcaatagatggtacaattgcagtgtgatatttttgggactcacgaatagcaaggaattcctcagagacatccagaccagcagaggagataatactctgcgctccgccagggtggccttcaagaaatgcttgaccatcatacacttctccattcacgatgaaccatggcttctcatcgcaggaattctccttgaattcttcaaaaccaatcactcggcttagcccgtctttcttcatattaatgtcttgcacgggctccggctccgtcggctcctctccttcgtgtctttctccccagttaccattcgtcaggtcacccccagcctttttgacgcgttccatccatcctgtaggcatactagggtgggtagggtgctcgaatctcaagttcccgttttccttcgtaattgtaacccggaaccacgggttgttcatcattccgagaacggaccagtacatatcgcgaggctgcacgcccaatgcttcgtccatggctcttacaaggatggcatcactgttctcaagctctgggatggtgatgcttagagaccaaaaacaccagcagaagcaagtttcgcgccagtacatatctactttgcctccaaaaagctcgccttcaaaatcacgatacttgtcttcggcatattcgatttccgccaatctccaagctataagtccgttagctttgataagcattctcacacatcgagcgagcgagggtgcgtacatttgcctttgtctagggatatttctaccctggtaaccctgcggcccccaccggcgtatgcatatcctctgacagtatatgacggccctgccgacaggagatttaagacctcattgttttggggatatgcaacggcggagttggtgtttaggtcataaatcgcataccgctcatcgtgccaccaatttcggttatttgatgccatctcaggcgagaccattgttctgggttagggagttagacaaatgatggaaatataaaataagtgccctttagacatacggtaagacgcggttgtcattgatatggtaccagttgtcgcttggtgcatcggtcaagatcagcctcttcagccacttaacacttcgtcctcctatttgaccgggcacgacggccctcagcggacgaccatgatctgggcgaagagactccccgttcattttatgtgcaagcatgatccccctgttggggtccagggcccagttcaatttaatagatgtgccgtagtgaccattgggctgcggcgaacttagcaattatcatcataagatagaggtacagcataccagcttatccgctccttccatacagacgtatttcgctttacgcaggggtttcgcactgcggagaatatccgccagcaatgggccagtgaagagggcagtcgatagtcccgccgatccccaggaaaaacctttcgttttacgtacaatgttttgctctttgcgtcgattgccagcacatacgagggtgataggcgctgttatttggtcgtactgctgcaacacttgtcggaagtttagtaccaaaggcttctctaccagtctatactttggttaacggatgtttggcagagaacctagcactatactaacccttcgatgctaatttcccagtgagggatatcttcatccttgatatgagggactgggccatgatttcgaacatagaagagctccggcgatgttaaaaaccctttcagagtgtgagaatgtaacggctcaaggggacaagcatgacagccggtgcaagcaacctgataaggataggagtggagcagttataactcataccttctttatacagatctcgagctcgcgaaagcttactagtgcatgcgtttctgcattaatgaatcggccaacgcgcggggagaggcggtttgcgtattgggcgctcttccgcttcctcgctcactgactcgctgcgctcggtcgttcggctgcggcgagcggtatcagctcactcaaaggcggtaatacggttatccacagaatcaggggataacgcaggaaagaacatgtgagcaaaaggccagcaaaaggccaggaaccgtaaaaaggccgcgttgctggcgtttttccataggctccgcccccctgacgagcatcacaaaaatcgacgctcaagtcagaggtggcgaaacccgacaggactataaagataccaggcgtttccccctggaagctccctcgtgcgctctcctgttccgaccctgccgcttaccggatacctgtccgcctttctcccttcgggaagcgtggcgctttctcatagctcacgctgtaggtatctcagttcggtgtaggtcgttcgctccaagctgggctgtgtgcacgaaccccccgttcagcccgaccgctgcgccttatccggtaactatcgtcttgagtccaacccggtaagacacgacttatcgccactggcagcagccactggtaacaggattagcagagcgaggtatgtaggcggtgctacagagttcttgaagtggtggcctaactacggctacactagaagaacagtatttggtatctgcgctctgctgaagccagttaccttcggaaaaagagttggtagctcttgatccgacaaacaaaccaccgctggtagcggtggtttttttgtttgcaagcagcagattacgcgcagaaaaaaaggatctcaagaagatcctttgatcttttctacggggtctgacgctcagtggaacgaaaactcacgttaagggattttggtcatgagattatcaaaaaggatcttcacctagatccttttaaattaaaaatgaagttttaaatcaatctaaagtatatatgagtaaacttggtctgacagactagtgcatgccctagggtcgac

SEQ ID NO: 160 - DNA, 6773 bp, Pseudomonas sp.
  source 1..6773: mol_type = genomic DNA
tcgcgcgtttcggtgatgacggtgaaaacctctgacacatgcagctcccggagacggtcacagcttgtctgtaagcggatgccgggagcagacaagcccgtcagggcgcgtcagcgggtgttggcgggtgtcggggctggcttaactatgcggcatcagagcagattgtactgagagtgcaccatatgcggtgtgaaataccgcacagatgcgtaaggagaaaataccgcatcaggcgccattcgccattcaggctgcgcaactgttgggaagggcgatcggtgcgggcctcttcgctattacgccagctggcgaaagggggatgtgctgcaaggcgattaagttgggtaacgccagggttttcccagtcacgacgttgtaaaacgacggccagtgaattcagtactactacaaaaaaagaatacgttatatagaaatatgtttgaaccttcttcagattacaaatatattcggacggactctacctcaaatgcttatctaactatagaatgacatacaagcacaaccttgaaaatttgaaaatataactaccaatgaacttgttcatgtgaattatcgctgtatttaattttctcaattcaatatataatatgccaatacattgttacaagtagaaattaagacacccttgatagccttactatacctaacatgatgtagtattaaatgaatatgtaaatatatttatgataagaagcgacttatttataatcattacatatttttctattggaatgattaagattccaatagaatagtgtataaattatttatcttgaaaggagggatgcctaaaaacgaagaacattaaaaacatatatttgcaccgtctaatggatttatgaaaaatcattttatcagtttgaaaattatgtattatggagctctataaaaatgaggagggaaccgaatgaagaaaccgttggggaaaattgtcgcaagcaccgcactactcatttctgttgcttttagttcatcgatagcatcggctgcacaggaaagcccggcattcatcgatcctgcgtcgtggaacaccccgttcaatggcattgcccaggtggcttgtcataactgctacgagaagcaatacgcgaacaccttcagcagtgtgcttgacagtgtacggaccctggaactggacttctgggaccagcgcgatgcggtgagcggcggttcgccccatcactggttcgtgcggcacaaccccggcaccttgttccaatccggcaacgacaataactgcaccggcgatggcaccggcaagaacgacctcgaagcctgtctgaacgacgtcaagaactggagtgacaagcatccggggcacttccccatcacgctgatcctggacaagaaacagggctggtcgaaagaaagttcggggcgcacaccaaaggatttcgacgaactggtggcgcgggtgttccagggcaagctctttaccccccaggatctggcgacgcacattggcagtggcgcgggggccttgcagggcaacctcaagggtaagtcctggcccaccgccaacgatctgcagggcaaggtgctgttggtgctcaaccactcggaaaaccagaagctctcgcagtacgccgaggcccgcacctctaaggctaaggtgttcatttcgccagtaaccaacggccagaacgatatcagtggcaaggtcagcggcatgtccagccagtcatccggctatgtagccatgaacaacatgggcaagggcgacaaaagttgggcaaagcaggcctttgcctacagccatatcggccgcgtctggggtgatgacgaggtgtcgttcgcccagcacatcaaccagaagatcaatctgtcggcgtactacaggttcgccgcgcagagcgctggcggctaccgcatccggccgttctaaacgcgttaatcaataaaaaaacgctgtgcggttaaagggcacagcgtttttttgtgtatcggcaatagttacccttattatcaagataagaaagaaaaggatttttcgctacgctcaaatcctttaaaaaaacacaaaagaccacattttttaatgtggtctttattcttcaactaaagcacccattagttcaacaaacgaaaattggataaagtgggatatttttaaaatatatatttatgttacagtaatattgacttttaaaaaaggattgattctaatgaagaaagcagacaagtaagcctcctaaattcactttagataaaaatttaggaggcatatcaaatgaactttaataaaattgatttagacaattggaagagaaaagagatatttaatcattatttgaaccaacaaacgacttttagtataaccacagaaattgatattagtgttttataccgaaacataaaacaagaaggatataaattttaccctgcatttattttcttagtgacaagggtgataaactcaaatacagcttttagaactggttacaatagcgacggagagttaggttattgggataagttagagccactttatacaatttttgatggtgtatctaaaacattctctggtatttggactcctgtaaagaatgacttcaaagagttttatgatttatacctttctgatgtagagaaatataatggttcggggaaattgtttcccaaaacacctatacctgaaaatgctttttctctttctattattccatggacttcatttactgggtttaacttaaatatcaataataatagtaattaccttctacccattattacagcaggaaaattcattaataaaggtaattcaatatatttaccgctatctttacaggtacatcattctgtttgtgatggttatcatgcaggattgtttatgaactctattcaggaattgtcagataggcctaatgactggcttttataatatgagataatgccgactgtactttttacagtcggttttctaatgtcactaacctgccccgttagttgaagaaggtttttatattacagctccagatcttaattaatcaccgaaatattatggaagaaaatatcagcaccatgacggccaaacggatgcttccaacggtgctaactatatcacgatgtcctacaactattatcacgatcatgataaaagctccattttcggatcaagtgacagcaaaacctccgatgacggcaaattaaaaattacgctgcatcataaccgctataaaaatattgtccagcgcgcgccgagagtccgcttcgggcaagtgcacgtatacaacaactattatgaaggaagcacaagctcttcaagttatccttttagctatgcatggggaatcggaaagtcatctaaaatctatgcccaaaacaatgtcattgacgtaccgggactgtcagctgctaaaacgatcagcgtattcagcgggggaacggctttatatgactccggcacgttgctgaacggcacacagatcaacgcatcggctgcaaacgggctgagttcttctgtcggctggacgccgtctctgcatggattgattgatgcttctgctaatgtgaaatcaaatgttataaatcaagcgggtgcgggtaaattaaattaagaaagtgaaaaacacaaagggtgctaacctgcggccgcgatgcttaggaagacgagttattaatagctgaataagaacggtgctctccaaatattcttatttagaaaagcaaatctaaaattatctgaaaagggaatgagaatagtgaatggaccaataataatgactagagaagaaagaatgaagattgttcatgaaattaaggaacgaatattggataaatatggggatgatgttaaggctattggtgtttatggctctcttggtcgtcagactgatgggccctattcggatattgagatgatgtgtgtcatgtcaacagaggaagcagagttcagccatgaatggacaaccggtgagtggaaggtggaagtgaattttgatagcgaagagattctactagattatgcatctcaggtggaatcagattggccgcttacacatggtcaatttttctctattttgccgatttatgattcaggtggatacttagagaaagtgtatcaaactgctaaatcggtagaagcccaaacgttccacgatgcgatttgtgcccttatcgtagaagagctgtttgaatatgcaggcaaatggcgtaatattcgtgtgcaaggaccgacaacatttctaccatccttgactgtacaggtagcaatggcaggtgccatgttgattggtctgcatcatcgcatctgttatacgacgagcgcttcggtcttaactgaagcagttaagcaatcagatcttccttcaggttatgaccatctgtgccagttcgtaatgtctggtcaactttccgactctgagaaacttctggaatcgctagagaatttctggaatgggattcaggagtggacagaacgacacggatatatagtggatgtgtcaaaacgcataccattttgaacgatgacctctaataattgttaatcatgttggttacgtaagtactaagcttggcgtaatcatggtcatagctgtttcctgtgtgaaattgttatccgctcacaattccacacaacatacgagccggaagcataaagtgtaaagcctggggtgcctaatgagtgagctaactcacattaattgcgttgcgctcactgcccgctttccagtcgggaaacctgtcgtgccagctgcattaatgaatcggccaacgcgcggggagaggcggtttgcgtattgggcgctcttccgcttcctcgctcactgactcgctgcgctcggtcgttcggctgcggcgagcggtatcagctcactcaaaggcggtaatacggttatccacagaatcaggggataacgcaggaaagaacatgtgagcaaaaggccagcaaaaggccaggaaccgtaaaaaggccgcgttgctggcgtttttccataggctccgcccccctgacgagcatcacaaaaatcgacgctcaagtcagaggtggcgaaacccgacaggactataaagataccaggcgtttccccctggaagctccctcgtgcgctctcctgttccgaccctgccgcttaccggatacctgtccgcctttctcccttcgggaagcgtggcgctttctcaatgctcacgctgtaggtatctcagttcggtgtaggtcgttcgctccaagctgggctgtgtgcacgaaccccccgttcagcccgaccgctgcgccttatccggtaactatcgtcttgagtccaacccggtaagacacgacttatcgccactggcagcagccactggtaacaggattagcagagcgaggtatgtaggcggtgctacagagttcttgaagtggtggcctaactacggctacactagaaggacagtatttggtatctgcgctctgctgaagccagttaccttcggaaaaagagttggtagctcttgatccggcaaacaaaccaccgctggtagcggtggtttttttgtttgcaagcagcagattacgcgcagaaaaaaaggatctcaagaagatcctttgatcttttctacggggtctgacgctcagtggaacgaaaactcacgttaagggattttggtcatgagattatcaaaaaggatcttcacctagatccttttaaattaaaaatgaagttttaaatcaatctaaagtatatatgagtaaacttggtctgacagttaccaatgcttaatcagtgaggcacctatctcagcgatctgtctatttcgttcatccatagttgcctgactccccgtcgtgtagataactacgatacgggagggcttaccatctggccccagtgctgcaatgataccgcgagacccacgctcaccggctccagatttatcagcaataaaccagccagccggaagggccgagcgcagaagtggtcctgcaactttatccgcctccatccagtctattaattgttgccgggaagctagagtaagtagttcgccagttaatagtttgcgcaacgttgttgccattgctacaggcatcgtggtgtcacgctcgtcgtttggtatggcttcattcagctccggttcccaacgatcaaggcgagttacatgatcccccatgttgtgcaaaaaagcggttagctccttcggtcctccgatcgttgtcagaagtaagttggccgcagtgttatcactcatggttatggcagcactgcataattctcttactgtcatgccatccgtaagatgcttttctgtgactggtgagtactcaaccaagtcattctgagaatagtgtatgcggcgaccgagttgctcttgcccggcgtcaatacgggataataccgcgccacatagcagaactttaaaagtgctcatcattggaaaacgttcttcggggcgaaaactctcaaggatcttaccgctgttgagatccagttcgatgtaacccactcgtgcacccaactgatcttcagcatcttttactttcaccagcgtttctgggtgagcaaaaacaggaaggcaaaatgccgcaaaaaagggaataagggcgacacggaaatgttgaatactcatactcttcctttttcaatattattgaagcatttatcagggttattgtctcatgagcggatacatatttgaatgtatttagaaaaataaacaaataggggttccgcgcacatttccccgaaaagtgccacctgacgtctaagaaaccattattatcatgacattaacctataaaaataggcgtatcacgaggccctttcgtc

SEQ ID NO: 161 - DNA, 795 bp, Bacillus thuringiensis
  source 1..795: mol_type = genomic DNA
catgaaaatgatgggggaagtaaaataaaaatagttcaccgcaaagttagagcgcaatggtctgctgaagataaacataaagaaggcgtaaattctcatttatggattgtaaaccgtgcgattgatattatgtctcgcaatacaacacttgtaaaacaagatcgagttgcacaattaaatgaatggcgtacagagttagagaacggtatttatgctgctgactatgaaaatccttattatgataatagcacatttgcttcacatttctatgatccagacaatggaaaaacatatattccatttgcaaagcaggcaaaagaaactggagctaaatattttaaattagcgggtgaatcatacaaaaataaagatatgaaacaagcattcttctatttaggattatctcttcattatttaggagatgtaaatcaaccgatgcatgcggcaaactttacaaatctttcgtatccacaaggattccattctaaatatgaaaactttgtagatacgataaaagataattataaagtaacggatggaaatggatattggaattggaaaggtacaaatccagaagattggatccatggagcggcagtagtggcgaaacaagattactctggaattgtaaatgataatacgaaagattggttcgtaaaagcagctgtgtcacaagaatatgcagataaatggcgtgctgaagttacaccgatgacaggtaagcgattaatggatgcacaacgtgttactgctggatacattcagctttggtttgatacgtacggagatcgttaa

SEQ ID NO: 162 - DNA, 1620 bp, Geobacillus stearothermophilus; identical to SEQ ID NO: 63
  source 1..1620: mol_type = genomic DNA

SEQ ID NO: 163 - DNA, 1760 bp, Aspergillus oryzae
  source 1..1760: mol_type = genomic DNA
catcaagctctcccttctctgaacaataaaccccacagaaggcatttatgatggtcgcgtggtggtctctatttctgtacggccttcaggtcgcggcacctgctttggctgcaacgcctgcggactggcgatcgcaatccatttatttccttctcacggatcgatttgcaaggacggatgggtcgacgactgcgacttgtaatactgcggatcagaaatactgtggtggaacatggcagggcatcatcgacaagttggactatatccagggaatgggcttcacagccatctggatcacccccgttacagcccagctgccccagaccaccgcatatggagatgcctaccatggctactggcagcaggatatatactctctgaacgaaaactacggcactgcagatgacttgaaggcgctctcttcggcccttcatgagagggggatgtatcttatggtcgatgtggttgctaaccatatgggctatgatggagcgggtagctcagtcgattacagtgtgtttaaaccgttcagttcccaagactacttccacccgttctgtttcattcaaaactatgaagatcagactcaggttgaggattgctggctaggagataacactgtctccttgcctgatctcgataccaccaaggatgtggtcaagaatgaatggtacgactgggtgggatcattggtatcgaactactccattgacggcctccgtatcgacacagtaaaacacgtccagaaggacttctggcccgggtacaacaaagccgcaggcgtgtactgtatcggcgaggtgctcgacggtgatccggcctacacttgtccctaccagaacgtcatggacggcgtactgaactatcccatttactatccactcctcaacgccttcaagtcaacctccggcagcatggacgacctctacaacatgatcaacaccgtcaaatccgactgtccagactcaacactcctgggcacattcgtcgagaaccacgacaacccacggttcgcttcttacaccaacgacatagccctcgccaagaacgtcgcagcattcatcatcctcaacgacggaatccccatcatctacgccggccaagaacagcactacgccggcggaaacgaccccgcgaaccgcgaagcaacctggctctcgggctacccgaccgacagcgagctgtacaagttaattgcctccgcgaacgcaatccggaactatgccattagcaaagatacaggattcgtgacctacaagaactggcccatctacaaagacgacacaacgatcgccatgcgcaagggcacagatgggtcgcagatcgtgactatcttgtccaacaagggtgcttcgggtgattcgtataccctctccttgagtggtgcgggttacacagccggccagcaattgacggaggtcattggctgcacgaccgtgacggttggttcggatggaaatgtgcctgttcctatggcaggtgggctacctagggtattgtatccgactgagaagttggcaggtagcaagatctgtagtagctcgtgaagggtggagagtatatgatggtactgctattcaatctggcattggacagtgagtttgagtttgatgtacagttggagtcgttactgctgtcatccccttatactcttcgattgtttttcgaaccctaatgccaagcacgctagtctattataggaaaaaaaaaaaaaaaaaaaaaaaaaaaaaaaaaaaaaaaaaaaaaaaaaaaaaaaaaaa

SEQ ID NO: 164 - DNA, 1449 bp, Alkalihalobacillus akibai
  source 1..1449: mol_type = genomic DNA
caccataatggtacgaacggcacaatgatgcagtactttgaatggtatctaccaaatgacggaaaccattggaatagattaaggtctgatgcaagtaacctaaaagataaagggatctcagcggtttggattcctcctgcatggaagggtgcctctcaaaatgatgtggggtatggtgcttatgatctgtatgatttaggagaattcaatcaaaaaggaaccattcgtacaaaatatggaacgcgcaatcagttacaagctgcggttaacgccttgaaaagtaatggaattcaagtgtatggcgatgttgtaatgaatcataaagggggagcagacgctaccgaaatggttaaagcagtcgaagtaaacccgaataatagaaatcaagaagtgtccggtgaatatacaattgaggcttggacaaagtttgactttccaggacgaggtaatactcattcaaacttcaaatggagatggtatcactttgatggagtagattgggatcagtcacgtaagctgaacaatcgaatttataaattccgcggtaaagggtgggattgggaagtcgatacagaattcggtaactatgattacctaatgtatgcagatattgacatggatcacccagaggtagtgaatgagctaagaaattggggtgtttggtatacgaatacattaggccttgatggttttagaatagatgcagtaaaacatataaaatacagctttactcgtgattggattaatcatgttagaagtgcaactggcaaaaatatgtttgcggttgcggaattttggaaaaatgatttaggtgctattgaaaactatttaaacaaaacaaactggaaccattcagtctttgatgttccgctgcactataacctctataatgcttcaaaaagcggagggaattatgatatgaggcaaatatttaatggtacagtcgtgcaaaagcatccaatgcatgctgttacatttgttgataatcatgattcgcaacctgaagaagctttagagtcttttgttgaagaatggttcaaaccattagcgtatgctttgacattaacacgtgaacaaggctacccttctgtattttatggagattattatggcattccaacgcatggtgtaccagcgatgaaatcgaaaattgacccgattctagaagcgcgtcaaaagtatgcatatggaagacaaaatgactacttagaccatcataatatcatcggttggacacgtgaagggaatacagcacaccccaactccggtttagctactatcatgtccgatggggcaggaggaaataagtggatgtttgttgggcgtaataaagctggtcaagtttggaccgatatcactggaaataaagccggtactgttacgattaatgctgatggatggggtaatttttctgtaaatggaggatcagtttctatttgggtaaacaaa

SEQ ID NO: 165 - DNA, 9449 bp, Geobacillus stearothermophilus
  source 1..9449: mol_type = genomic DNA
attattaatctgttcagcaatcgggcgcgattgctgaataaaagatacgagagacctctcttgtatcttttttattttgagtggttttgtccgttacactagaaaaccgaaagacaataaaaattttattcttgctgagtctggctttcggtaagctagacaaaacggacaaaataaaaattggcaagggtttaaaggtggagattttttgagtgatcttctcaaaaaatactacctgtcccttgctgatttttaaacgagcacgagagcaaaacccccctttgctgaggtggcagagggcaggtttttttgtttcttttttctcgtaaaaaaaagaaaggtcttaaaggttttatggttttggtcggcactgccgacagcctcgcagagcacacactttatgaatataaagtatagtgtgttatactttacttggaagtggttgccggaaagagcgaaaatgcctcacattaaagataatatctttgaattgtaacgcccctcaaaagtaagaactacaaaaaaagaatacgttatatagaaatatgtttgaaccttcttcagattacaaatatattcggacggactctacctcaaatgcttatctaactatagaatgacatacaagcacaaccttgaaaatttgaaaatataactaccaatgaacttgttcatgtgaattatcgctgtatttaattttctcaattcaatatataatatgccaatacattgttacaagtagaaattaagacacccttgatagccttactatacctaacatgatgtagtattaaatgaatatgtaaatatatttatgataagaagcgacttatttataatcattacatatttttctattggaatgattaagattccaatagaatagtgtataaattatttatcttgaaaggagggatgcctaaaaacgaagaacattaaaaacatatatttgcaccgtctaatggatttatgaaaaatcattttatcagtttgaaaattatgtattatggagctctgaaaaaaaggagaggataaagaatgaaacaacaaaaacggctttacgcccgattgctgacgctgttatttgcgctcatcttcttgctgcctcattctgcagcagcggcggcaccgtttaatggcacgatgatgcaatattttgaatggtatctgccggatgatggcacgctgtggacgaaagtcgcgaacgaagcgaacaacctgagcagcctgggcatcacggcactgtggctgcctccggcatataaaggcacgagccgcagcgacgtcggctatggcgcatatgatctgtatgacctgggcgaatttaaccaaaaaggcacggtccgcacgaaatatggcacgaaagcgcaatatctgcaagcgatccaagcggcacatgcggcaggcatgcaagtctatgcggatgtcgtctttgatcataaaggcggagcggatggcacggaatgggtcgatgcggtcgaagtcaacccgagcgatcgcaaccaagtcatcagcggcacgtatcaaatccaagcctggacgaaatttgattttcctggcagaggcaacacgtacagcagctttaaatggcgctggtatcattttgatggcgtcgattgggatgaaagccgcaaactgagccgcatctatctttttagcggcaaacaatgggattggcctgtcgataacgaatttggcaactatgactatctgatgtatgcggatctggatatggatcatccggaagtcacgacggaactgaaaaactggggcaaatggtatgtcaacacgacgaacatcgatggctttcgcctggatgcggtcaaacatatcaaattttacttttttccggactggctgagctatgtccgcagcagcacgggcaaaccgctgtttacggtcggcgaatattggagcggagatatcaacaaactgcataactatatcacgataacggatggaacggtcagcctgtttgatgcaccgctgcattataagttttataacgcgagcaaaagcggaggcgcttttgatatgcgcacactgatgacgaacacgctgatgaaagatcaaccgacgctggcggtcacgtttgtcgataatcatgatacggaaccgggacaagcgctgcaaagctgggtcgatccgtggttcaaaccgcttgcgtatgcgtttatcctgacgagacaagaaggctatccttgcgtcttttatggcgattattatggcatcccgcaatataacatcccgagcctgaaaagcaaaatcgatccgctgctgatcgcgagaagagattatgcgtatggcacgcaacatgattatttggatcatagcgatatcatcggctggacgagagaaggcggtacggaaaaacctggcagcggactggcagcgctgatcacggatggacctggcggaagcaaatggatgtatgtcggcaaacagcatgcgggaaaagttttttatgatctgacgggcaaccgcagcgatacggtcacgatcaacagcgacggctggggagaattcaaagtcaatggcggatcagtcagcgtctgggtcccgagaaaaacgacggtcagcacgatcgcaagaccgtaacgcgtagggcccgcggctagcggccgcgtcgactagaagagcagagaggacggatttcctgaaggaaatccgtttttttattttgcccgtcttataaatttcgttgtccaactcgcttaattgcgagtttttatttcgtttatttcaattaaggtaactaaagatcctctagagtcgattatgtcttttgcgcagtcggcttaaaccagttttcgctggtgcgaaaaaagagtgtcttgtgacactcttaaattcaaaatctatcggtcagatttataccgatttgattttatatattcttgaataacatacgccgagttatcacataaaagcgggaaccaatcatcaaatttaaacttcattgcataatccattaaactcttaaattctacgattccttgttcatcaataaactcaatcatttctttaattaatttatatctatctgttgttgttttctttaataattcatcaacatctacaccgccataaactatcatatcttctttttgatatttaaatttattaggatcgtccatgtgaagcatatatctcacaagacctttcacacttcctgcaatctgcggaatagtcgcattcaattcttctgtaattatttttatctgttcataagatttattaccctcatacatcactagaatatgataatgctcttttttcatcctaccttctgtatcagtatccctatcatgtaatggagacactacaaattgaatgtgtaactcttttaaatactctaaccactcggcttttgctgattctggatataaaacaaatgtccaattacgtcctcttgaatttttcttgttttcagtttcttttattacattttcgctcatgatataataacggtgctaatacacttaacaaaatttagtcatagataggcagcatgccagtgctgtctatctttttttgtttaaaatgcaccgtattcctcctttgcatatttttttattagaataccggttgcatctgatttgctaatattatatttttctttgattctatttaatatctcattttcttctgttataagtcttaaagtaacagcaacttttttctcttcttttctatctacaaccatcactgtacctcccaacatctgtttttttcactttaacataaaaaacaaccttttaacattaaaaacccaatatttatttatttgtttggacaatggacaatggacacctaggggggaggtcgtagtacccccctatgttttctcccctaaataaccccaaaaatctaagaaaaaaagacctcaaaaaggtctttaattaacatctcaaatttcgcatttattccaatttcctttttgcgtgtgatgcgctgcgtccattaaaaatcctagagctttgcaaccgaaagttaatagctgtcgctactactttcgcttacgctctaagtatattttaaggactgtcacacgcaaaaagttttctcggcataaaagtacctctacatctctaaatcgtctgtacgctgtttctcacgctttctatcgaccttctggacattatcctgtacaacatccataaactgtcccacacgctcgaatttggaatcattaaagaatttctctttaagcctattaaaccctttctcaaacccagggaaattcgccctcgcagcacgatataaagtcactgtactatcttgaaatttctctgatacattcaactgctcattcaaactatcattctctcgctttaatttattaacctctttacttttttcgtgatacccctctttccatgtattcactacttctttcaaactctctctacgtttttttaattcttgattttctgtgtaatagtctgtgctcttaatattttcgtaatcatcaacaatccgttctgcagaagagattgtttcttgcaggcgttcaaattcatcagcagttaatatctttctaccagtctcttcacgtccagagaacaaacctgtacgctcattttcataatcaaagggtttcgtagacctcatatgctctattccactctgtaactgcttatttgccttctgtaactcatccttaacttcttgcagttcctgtttatgaaatacagtatctttcttgtactgatccatcgctttatgttctcgttctgtaacctctttggacgtgcctctttcaagttcataacctttctcattcacatactcattaaatctatcttgtaattgagtaaagtctttcttgttgcctaactgttcttttgcagacaatctcccgtcctctgttaaagggacaaaaccaaagtgcatatgtgggactctttcatccagatggacagtcgcatacagcatattttccttaccgtattcattttctagaaactccaagctatctttaaaaaatcgttctatttcttctccgcttaaatcatcaaagaaatctttatcacttgtaaccagtccgtccacatgtcgaattgcatctgaccgaattttacgtttccctgaataattctcatcaatcgtttcatcaattttatctttatactttatattttgtgcgttaatcaaatcataatttttatatgtttcctcatgatttatgtctttattattatagtttttattctctctttgattatgtctttgtatcccgtttgtattacttgatcctttaactctggcaaccctcaaaattgaatgagacatgctacacctccggataataaatatatataaacgtatatagatttcataaagtctaacacactagacttatttacttcgtaattaagtcgttaaaccgtgtgctctacgaccaaaactataaaacctttaagaactttctttttttacaagaaaaaagaaattagataaatctctcatatcttttattcaataatcgcatccgattgcagtataaatttaacgatcactcatcatgttcatatttatcagtgctcgtgctataattatactaattttataaggaggaaaaaatatgggcatttttagtatttttgtaatcagcacagttcattatcaaccaaacaaaaaataagtggttataatgaatcgttaataagcaaaattcatataaccaaattaaagagggttataatgaacgagaaaaatataaaacacagtcaaaactttattacttcaaaacataatatagataaaataatgacaaatataagattaaatgaacatgataatatctttgaaatcggctcaggaaaaggccattttacccttgaattagtaaagaggtgtaatttcgtaactgccattgaaatagaccataaattatgcaaaactacagaaaataaacttgttgatcacgataatttccaagttttaaacaaggatatattgcagtttaaatttcctaaaaaccaatcctataaaatatatggtaatataccttataacataagtacggatataatacgcaaaattgtttttgatagtatagctaatgagatttatttaatcgtggaatacgggtttgctaaaagattattaaatacaaaacgctcattggcattacttttaatggcagaagttgatatttctatattaagtatggttccaagagaatattttcatcctaaacctaaagtgaatagctcacttatcagattaagtagaaaaaaatcaagaatatcacacaaagataaacaaaagtataattatttcgttatgaaatgggttaacaaagaatacaagaaaatatttacaaaaaatcaatttaacaattccttaaaacatgcaggaattgacgatttaaacaatattagctttgaacaattcttatctcttttcaatagctataaattatttaataagtaagttaagggatgcataaactgcatcccttaacttgtttttcgtgtgcctattttttgtgaatcgacctgcaggcatgcaagcttaagcgagttggaatttaaatatgatatctacattatcagcagtaacatcaacctttgatacaaggttgttgacgattttctttttattatcatatgatagttcattaatcggaattgagcccaactgagttttaactaactcaaaaacatcagtagagtcattaaatttattttcgctaatcttagctttaagcagctttttctcagcctgaagggaatcagtacgatctttcaactcatccatagtgataaaatcatttaggtacaaatcagagttcttttgtatttttttatcgatctgtgaaatttgctttttaaatgacgaagtatcaagaataggttggttgttgccattgataattttcaataaggagtcattattttcttgaaatccaatcaggttgtcaataacagtattttctaaattacttaaatcataagttcctgaatcacactttttattgtcattatatactgtaattccttttgtttttcgaggaaatctatttgcacagtgatatttcatagtgcggcttccatcttttcttttgtggccaagaacaatttttaaaggtgctccacagtaaccgcaccttgccatccctgacagcatatatttagcttggaaaggtctagggttgttatttctttcataagtctgctgttgtctttcttctagctctttttgaacttttaaataagtctcataagggataattggtttgtgcataccttcaaataggctgtccttaaatttgatataaccacagtaaactggattatcaagtgtttgtcttagggtacgataagaccacggtatatctttaccgatgtgtccagattcattgagtttatctcttaattttgtaagtgatattcctgataaataatcagtgaatatttgttcaactattgtagcttgtaaaggaacaatttctaatatacctgtctttctgttgtggtaatacccaaaagctgtcttagtccacatcatagacttaccagatttcgctcgccctagtttacccatagtcatgcgttcttttatattctctctttcaaactcattaattgcagaaagaatagtgagaaacaagctacccatagcagaagaagtatcaatactttcattaagcgagataaagtctattttattttttgtgaacacatccttaacaagataaagagtatctcttacactacgtgaaaggcggtctagcttatatacaagaactgtatcaaaagctttattctcgatatcgttgattaatctttgcattgctgggcgttcaagtttggcccctgaaaaaccagcatcagtataagtatcagatacttgccaccccattgcttcagcatattttgttaaacggtcaatttgctcatcaattgagaacccttcctctgcttggttagtagtggatactcgtgtatagattgctactttcttagtcatgagatttcccccttaaaaataaattcattcaaatacagatgcattttatttcatatagtaagtacatcacctattagtttgttgtttaaacaaactaacttattttcatcttatatagcctcgtcagtattttcaatattttttttagttttttatgaacacattagatataataaagggaagattcgctatgtactatgttgatacttaatttaaagattaaacaaatggagtggatgaagtggatatcgctgatcaaacctttgtcaaaaaagtaaatcaaaagttattattaaaagaaatccttaaaaattcacctatttcaagagcaaaattatctgaaatgactggattaaataaatcaactgtctcatcacaggtaaacacgttaatgaaagaaagtatggtatttgaaataggtcaaggacaatcaagtggcggaagaagacctgtcatgcttgtttttaataaaaaggcaggatactccgttggaatagatgttggtgtggattatattaatggcattttaacagaccttgaaggaacaatcgttcttgatcaataccgccatttggaatccaattctccagaaataacgaaagacattttgattgatatgattcatcactttattacgcaaatgccccaatctccgtacgggcttattggtataggtatttgcgtgcctggactcattgataaagatcaaaaaattgttttcactccgaactccaactggagagatattgacttaaaatcttcgatacaagagaagtacaatgtgcctgtttttattgaaaatgaggcaaatgctggcgcatatggagaaaaagtatttggagctgcaaaaaatcacgataacattatttacgtaagtatcagcacaggaatagggatcggtgttattatcaacaatcatttatatagaggagtaagcggcttctctggagaaatgggacatatgacaatagactttaatggtcctaaatgcagttgcggaaaccgaggatgctgggaattgtatgcttcagagaaggctttattaaaatctcttcagaccaaagagaaaaaactgtcctatcaagatatcataaacctcgcccatctgaatgatatcggaaccttaaatgcattacaaaattttggattctatttaggaataggccttaccaatattctaaatactttcaacccacaagccgtaattttaagaaatagcataattgaatcgcatcctatggttttaaattcaatgagaagtgaagtatcatcaagggtttattcccaattaggcaatagctatgaattattgccatcttccttaggacagaatgcaccggcattaggaatgtcctccattgtgattgatcattttctggacatgattacaatgtaattttttatggaatggacagctcatctttaaagatgagtttttttattctaggagtatttctgaattcgtgctc

SEQ ID NO: 166 - DNA, 10717 bp, Pyrococcus furiosus
  source 1..10717: mol_type = genomic DNA
aatgtataatgcaccgattccaatgctgatgacggacagaacgattaaaatcacggccaatatgagtatcgccagtaaggggcgtttttgttttctggttgttttcttcatttcaggtttcgccctttccttgccaaatataagaaaaacggcgttccgataatcgcggtgacaatgccgaccggtgattcataaggaaatgcaatccatctggccagaacatctgcgtacaccagcaaaatggcaccgaacagtgccgaaaacggaagcacgtattgataatgttctccgatcagcttgcggacaatatgcgggacgagcagcccgacaaagccaatcggcccggcgacggctacggaagcgccggaaagaattaaaataatcaaactgatcagaatcctgatgccgttcatattttgtccaagcccttttgctgtttcgtctccgagaccgagaacagaaacagaaccggaaaatacgagggcaagcccgatgccaatgacagaaaaaggagcgatggttatgacgtcctgccagttgctgccgtcgattgcgcctgtcatccagtacagaacatcctcacctgactcatttaaaataatgatggcctgtgtcatagaggagaggaacaagtgcacggccattcctgacagcgccagcttgacaggcgtcattccgccggatgaggcaatcatatacacaatcgcgccgcctgctgccgcacccgcaaaagcgaatataacagatgaatagggcgatgccggcagaatgacgagagaagcaacaacaaaaagcgatgcacccgcattcacaccgaaaatttggggtgaagccagaggatttctggtcatagcctgcatcagcgcccctgctacagctaggctggcgccgacaaaaacgccgattaatgtgcggggaaggcgaagagtagagatgatgagctgttcctttgaaccgtcccatacaaaaagatatttcaatgaatctatgatgctgatgtctgaggctcctactgaaagattcagcccaagcccaaatataaaaataatcagtgcaatgataaacatcatcagtcttgatgatgagcgccgtttggctgaatgatacaacagtctcacttccttactgcgtctggttgcaaaaacgaagaagcaaggattcccctcgcttctcatttgtcctatttattatacacttttttaagcacatctttggcgcttgtttcactagacttgatgcctctgaatcttgtccaagtgtcacggtccgcatcatagacttgtccatttttcaccgctttgagatttttccagagcgggttcgttttccactcatctacaatggttttgccttcgttggctgagatgaacaaaatatcaggatcgattttgctcaattgctcaaggctgacctcttgataggcgttatctgacttcacagcgtgtgtaaagcctagcattttaaagatttctccgtcataggatgatgatgtatgaagctggaaggaatccgctcttgcaacgccgagaacgatgttgcggttttcatctttcggaagttcggcttttagatcgttgatgacttttttgtgctcggcaagcttttcttttccttcatcttctttatttaatgctttagcaatggtcgtaaagctgtcgatcgtttcgtcatatgtcgcttcacggctttttaattcaatcgtcggggcgatttttttcagctgtttataaatgtttttatggcgctcagcgtcagcgatgattaaatcaggcttcaaggaactgatgacctcaagattgggttcgctgcgtgtgcctacagatgtgtaatcaatggagctgccgacaagctttttaatcatatcttttttgttgtcatctgcgatgcccaccggcgtaatgccgagattgtgaacggcatccaagaatgaaagctcaagcacaaccacccgcttaggtgtgccgcttactgtcgtttttccttcttcgtcatggatcactctggaatccttagactcgcttttgccgcttccgttgttattctggcttgatgaacagccggatacaatgaggcaggcgagcaataaaacactcatgatggcaatcaacttgttagaataggtgcgcatgtcattcttccttttttcagatttagtaatgagaatcattatcacatgtaacactataatagcatggcttatcatgtcaatatttttttagtaaagaaagctgcgtttttactgctttctcatgaaagcatcatcagacacaaataagtggtatgcagcgttaccgtgtcttcgagacaaaaacgcatgggcgttggctttagaggtttcgaacatatcagcagtgacataaggaaggagagtgctgagataaccggacaatttcttttctatttcatctgttagtgcaaattcaatgtcgccgatattcatgataatcgagaaaacaaagtcgatatcgatatgaaaatgttcctcggcaaaaaccgcaagctcgtgaattcctggtgaacatccggcacgcttatggaaaatctgtttgactaaatcactcacaatccaagcattgtattgctgttctggtgaaaagtattgcattagacatacctcctgctcgtacggataaaggcagcgtttcatggtcgtgtgctccgtgcagcggcttctccttaattttgatttttctgaaaataggtcccgttcctatcactttaccatggacggaaaacaaatagctactaccattcctcctgtttttctcttcaatgttctggaatctgtttcaggtacagacgatcgggtatgaaagaaatatagaaaacatgaaggaggaatatcgacatgaaaccagttgtaaaagagtatacaaatgacgaacagctcatgaaagatgtagaggaattgcagaaaatgggtgttgcgaaagaggatgtatacgtcttagctcacgacgatgacagaacggaacgcctggctgacaacacgaacgccaacacgatcggagccaaagaaacaggtttcaagcacgcggtgggaaatatcttcaataaaaaaggagacgagctccgcaataaaattcacgaaatcggtttttctgaagatgaagccgctcaatttgaaaaacgcttagatgaaggaaaagtgcttctctttgtgacagataacgaaaaagtgaaagcttgggcataaagcaaggaaaaaaccaaaaggccaatgtcggccttttggtttttttgcggtctttgcggtgggattttgcagaatgccgcaataggatagcggaacattttcggttctgaatgtccctcaatttgctattatatttttgtgataaattggaataaaatctcacaaaatagaaaatgggggtacatagtggatgaaaaaagtgatgttagctacggctttgtttttaggattgactccagctggcgcgaacgcagctgatttaggccaccagacgttgggatccaatgatggctggggcgcgtactcgaccggcacgacaggcggatcaaaagcatcctcctcaaatgtgtataccgtcagcaacagaaaccagcttgtctcggcattagggaaggaaacgaacacaacgccaaaaatcatttatatcaagggaacgattgacatgaacgtggatgacaatctgaagccgcttggcctaaatgactataaagatccggagtatgatttggacaaatatttgaaagcctatgatcctagcacatggggcaaaaaagagccgtcgggaacacaagaagaagcgagagcacgctctcagaaaaaccaaaaagcacgggtcatggtggatatccctgcaaacacgacgatcgtcggttcagggactaacgctaaagtcgtgggaggaaacttccaaatcaagagtgataacgtcattattcgcaacattgaattccaggatgcctatgactattttccgcaatggttgtaaaacgacggccagtgaattctgatcaaatggttcagtgagagcgaagcgaacacttgattttttaattttctatcttttataggtcattagagtatacttatttgtcctataaactatttagcagcataatagatttattgaataggtcatttaagttgagcatattagaggaggaaaatcttggagaaatatttgaagaacccgaggatctagatcaggtaccgcaacgttcgcagatgctgctgaagagattattaaaaagctgaaagcaaaaggctatcaattggtaactgtatctcagcttgaagaagtgaagaagcagagaggctattgaataaatgagtagaaagcgccatatcggcgcttttcttttggaagaaaatatagggaaaatggtacttgttaaaaattcggaatatttatacaatatcatatgtatcacattgaaaggaggggcctgctgtccagactgtccgctgtgtaaaaaaaaggaataaaggggggttgacattattttactgatatgtataatataatttgtataagaaaatggaggggccctcgaaacgtaagatgaaaccttagataaaagtgctttttttgttgcaattgaagaattattaatgttaagcttaattaaagataatatctttgaattgtaacgcccctcaaaagtaagaactacaaaaaaagaatacgttatatagaaatatgtttgaaccttcttcagattacaaatatattcggacggactctacctcaaatgcttatctaactatagaatgacatacaagcacaaccttgaaaatttgaaaatataactaccaatgaacttgttcatgtgaattatcgctgtatttaattttctcaattcaatatataatatgccaatacattgttacaagtagaaattaagacacccttgatagccttactatacctaacatgatgtagtattaaatgaatatgtaaatatatttatgataagaagcgacttatttataatcattacatatttttctattggaatgattaagattccaatagaatagtgtataaattatttatcttgaaaggagggatgcctaaaaacgaagaacattaaaaacatatatttgcaccgtctaatggatttatgaaaaatcattttatcagtttgaaaattatgtattatggagctctgaaaaaaaggagaggataaagaatgaaacaacaaaaacggctttacgcccgattgctgacgctgttatttgcgctcatcttcttgctgcctcattctgcagcagcggcggcaccgtttaacggcaccatgatgcagtattttgaatggtacttgccggatgatggcacgttatggaccaaagtggccaatgaagccaacaacttatccagccttggcatcaccgctctttggctgccgcccgcttacaaaggaacaagccgcagcgacgtagggtacggagcctacgacttgtatgacctcggcgaattcaatcaaaaagggaccgtccgcacaaaatacggaacaaaagctcaatatcttcaagccattcgagccgcccacgccgctggaatgcaagtgtacgccgatgtcgtgttcgaccataaaggcggcgctgacggcacggaatgggtggacgccgtcgaagtcaatccgtccgaccgcaaccaagtgatctcgggtacctatcaaatccaagcatggacgaaatttgattttcccgggcggggcaacacctactccagctttaagtggcgctggtaccattttgacggcgttgattgggacgaaagccgaaaattgagccgcatttacttgttcgagggcaaggcttgggattgggaagtagacacggaattcggaaactatgactacttaatgtatgccgaccttgatatggatcatcccgaagtcgtgaccgagctgaaaaactgggggaaatggtatgtcaacacaacgaacattgatgggttccggcttgatgccgtcaagcatattaagttcagtttttttcctgattggttgtcgtatgtgcgttctagcactggcaagccgctatttaccgtcggggaatattggagctatgacatcaacaagttgcacaattacattacgaaaacagacggaacggtctctttgtttgatgccccgttacacaacaaattttataccgcttccaaatcagggggcgcatttgatatgcgcacgttaatgaccaatactctcatgaaagatcaaccgacattggccgtcaccttcgttgataatcatgacaccgaacccggccaagcgctgcagtcatgggtcgacccatggttcaaaccgttggcttacgcctttattctaactcggcaggaaggatacccgtgcgtcttttatggtgactattatggcattccacaatataacattccttcgctgaaaagcaaaatcgatccgctcctcatcgcgcgcagggattatgcttacggaacgcaacatgattatcttgatcactccgacatcatcgggtggacaagggaagggggcactgaaaaaccaggatccggactggccgcactgatcaccgatgggccgggaggaagcaaatggatgtacgttggcaaacaacacgctggaaaagtgttctatgaccttaccggcaaccggagtgacaccgtcaccatcaacagtgatggatggggggaattcaaagtcaatggcggttcggtttcggtttgggttcctagaaaaacgaccgtttctaccatcgctcggccgtaatcgcatgttcaatccgctccataaccgatcgacgcggcggttcgcgtccggacagcacatcaccgaaatatttcgacggcccagccggctagcgcgttaatccgcggatatatagcggccgcagatctgggaccaataataatgactagagaagaaagaatgaagattgttcatgaaattaaggaacgaatattggataaagtgggatatttttaaaatatatatttatgttacagtaatattgacttttaaaaaaggattgattctaatgaagaaagcagacaagtaagcctcctaaattcactttagataaaaatttaggaggcatatcaaatgaactttaataaaattgatttagacaattggaagagaaaagagatatttaatcattatttgaaccaacaaacgacttttagtataaccacagaaattgatattagtgttttataccgaaacataaaacaagaaggatataaattttaccctgcatttattttcttagtgacaagggtgataaactcaaatacagcttttagaactggttacaatagcgacggagagttaggttattgggataagttagagccactttatacaatttttgatggtgtatctaaaacattctctggtatttggactcctgtaaagaatgacttcaaagagttttatgatttatacctttctgatgtagagaaatataatggttcggggaaattgtttcccaaaacacctatacctgaaaatgctttttctctttctattattccatggacttcatttactgggtttaacttaaatatcaataataatagtaattaccttctacccattattacagcaggaaaattcattaataaaggtaattcaatatatttaccgctatctttacaggtacatcattctgtttgtgatggttatcatgcaggattgtttatgaactctattcaggaattgtcagataggcctaatgactggcttttatatgagataatgccgactgtactttttacagtcggttttctaacgatacattaataggtacgaaaaagcaactttttttgcgcttaaaaccagtcataccaataacttaagggtaactagcctcgccggaaagagcgaaaatgcctcacatttgtgccacctaaaaaggagcgatttacatatgagttatgcagtttgtagaatgcaaaaagtgaaatcagctggactaaaaggggccgcagagtagaatggaaaaggggatcggaaaacaagtatataggaggagacctatttatggcttcagaaaaagacgcaggaaaacagtcagcagtaaagcttgttccattgcttattactgtcgctgtgggactaatcatctggtttattcccgctccgtccggacttgaacctaaagcttggcatttgtttgcgatttttgtcgcaacaattatcggctttatctccaagcccttgccaatgggtgcaattgcaatttttgcattggcggttactgcactaactggaacactatcaattgaggatacattaagcggattcgggaataagaccatttggcttatcgttatcgcattctttatttcccggggatttatcaaaaccggtctcggtgcgagaatttcgtatgtattcgttcagaaattcggaaaaaaaacccttggactttcttattcactgctattcagtgatttaatactttcacctgctattccaagtaatacggcgcgtgcaggaggcattatatttcctattatcagatcattatccgaaacattcggatcaagcccggcaaatggaacagagagaaaaatcggtgcattcttattaaaaaccggttttcaggggaatctgatcacatctgctatgttcctgacagcgatggcggcgaacccgctgattgccaagctggcccatgatgtcgcaggggtggacttaacatggacaagctgggcaattgccgcgattgtaccgggacttgtaagcttaatcatcacgccgcttgtgatttacaaactgtatccgccggaaatcaaagaaacaccggatgcggcgaaaatcgcaacagaaaaactgaaagaaatgggaccgttcaaaaaatcggagctttccatggttatcgtgtttcttttggtgcttgtgctgtggatttttggcggcagcttcaacatcgacgctaccacaaccgcattgatcggtttggccgttctcttattatcacaagttctgacttgggatgatatcaagaaagaacagggcgcttgggatacgctcacttggtttgcggcgcttgtcatgctcgccaacttcttgaatgaattaggcatggtgtcttggttcagtaatgccatgaaatcatccgtatcagggttctcttggattgtggcattcatcattttaattgttgtgtattattactctcactatttctttgcaagtgcgacagcccacatcagtgcgatgtattcagcatttttggctgtcgtcgtggcagcgggcgcaccgccgcttttagcagcgctgagcctcgcgttcatcagcaacctgttcgggtcaacgactcactacggttctggagcggctccggtcttcttcggagcaggctacatcccgcaaggcaaatggtggtccatcggatttatcctgtcgattgttcatatcatcgtatggcttgtgatcggcggattatggtggaaagtactaggaatatggtagaaagaaaaaggcagacgcggtctgcctttttttattttcactccttcgtaagaaaatggattttgaaaaatgagaaaattccctgtgaaaaatggtatgatctaggtagaaaggacggctggtgctgtggtgaaaaagcggttccatttttccctgcaaacaaaaataatggggctgattgcggctctgctggtctttgtcattggtgtgctgaccattacgttagccgttcagcatacacagggagaacggagacaggcagagcagctggcggttcaaacggcgagaaccatttcctatatgccgccggttaaagagctcattgagagaaaagacggacatgcggctcagacgcaagaggtcattgaacaaatgaaagaacagactggtgcgtttgccatttatgttttgaacgaaaaaggagacattcgcagcgcctctggaaaaagcggattaaagaaactggagcgcagcagagaaattttgtttggcggttcgcatgtttctgaaacaaaagcggatggacgaagagtgatcagagggagcgcgccgattataaaagaacagaagggatacagccaagtgatcggcagcgtgtctgttgattttctgcaaacggagacagagcaaagcatcaaaaagcatttgagaaatttgagtgtgattgctgtgcttgtactgctgctcggatttattggcgccgccgtgctggcgaaaagcatcagaaaggatacgctcgggcttgaaccgcatgagatcgcggctctatatcgtgagaggaacgcaatgcttttcgcgattcgagaagggattattgccaccaatcgtgaaggcgtcgtcaccatgatgaacgtatcggcggccgagatgctgaagctgcccgagcctgtgatccatcttcctatagatgacgtcatgccgggagcagggctgatgtctgtgcttgaaaaaggagaaatgctgccgaaccaggaagtaagcgtcaacgatcaagtgtttattatcaatacgaaagtgatgaatcaaggcgggcaggcgtatgggattgtcgtcagcttcagggagaaaacagagctgaagaagctgatcgacacattgacagaggttcgcaaatattcagaggatctcagggcgcagactcatgaattttcaaataagctttatgcgattttagggctgcttgagcttggggagtatgatgaagccattgatctgattaaagaggaatatgcgatacaaaatgaacagcatgatcttttattccataacatccattcgc

SEQ ID NO: 167 - DNA, 942 bp, Humicola insolens
  source 1..942: mol_type = genomic DNA
atgcgttcctcccccctcctccgctccgccgttgtggccgccctgccggtgttggcccttgccgctgatggcaggtccacccgctactgggactgctgcaagccttcgtgcggctgggccaagaaggctcccgtgaaccagcctgtcttttcctgcaacgccaacttccagcgtatcacggacttcgacgccaagtccggctgcgagccgggcggtgtcgcctactcgtgcgccgaccagaccccatgggctgtgaacgacgacttcgcgctcggttttgctgccacctctattgccggcagcaatgaggcgggctggtgctgcgcctgctacgagctcaccttcacatccggtcctgttgctggcaagaagatggtcgtccagtccaccagcactggcggtgatcttggcagcaaccacttcgatctcaacatccccggcggcggcgtcggcatcttcgacggatgcactccccagttcggcggtctgcccggccagcgctacggcggcatctcgtcccgcaacgagtgcgatcgattccccgacgccctcaagcccggctgctactggcgcttcgactggttcaagaacgccgacaatccaagcttcagcttccgtcaggtccagtgcccagccgagctcgtcgctcgcaccggatgccgccgcaacgacgacggcaacttccctgccgtccagatcccctccagcagcaccagctctccggtcaaccagcctaccagcaccagcaccacgtccacctccaccacctcgagcccgccagtccagcctacgactcccagcggctgcactgctgagaggtgggctcagtgcggcggcaatggctggagcggctgcaccacctgcgtcgctggcagcacttgcacgaagattaatgactggtaccatcagtgcctgtagtcgacctgcaggcatgcaagcttg

SEQ ID NO: 168 - DNA, 1672 bp, Evansstolkia leycettana
  source 1..1672: mol_type = genomic DNA
catctaccaggctacaaaagtgcataaatacatcccaatcccgctgtcagatggaagggagaagaaagaggtgtccagtcgttgcctcaccgattccctaaaaactgtggacactcggtcacagccatggctccaaaactcgctttcacagctctggctgttcttcctattgtcgctgcccagcagattggcacaacccctgagactcacccctcgctgacgacctggaaatgtacgaccggaggcgggtgtgtcgcgcaggatacctctattgtcatcgactgggggtaccattggatccatcagaccggaactgatgtttcgtgtacgacttctaacggggtgaactcgaccttgtgccccaacgaggcgacatgctcccagaactgcgtgattgagggagcaaactacaccagcagcggcgttgcaacgtcgggcagctccctgactctccatcaatatgtccagagcaatggtcagaccagcaacgcgtccccacgtgtctatctcttgggccccgatgggaactacgtcatgctccagctccttggccaggagctgagctttgatgtggatgtctccacgctggtctgcggagagaacggtgcactgtatctctccgagatggacgccaccggtggtcgcagccagtacaatcctggaggagccaactatggttctggatactgtgatgctcaatgccccgtcgagacctggatgaacggcaccctcaacaccagtggacagggttactgctgcaatgaaatggatctctgggaggcgaatgcgtacgcaacggcctacacgccccatccgtgcggcaatggatcgtgcgacaagagtggatgcggtttcaatccctacgccttgggagaccacagctactacggacccggtttgacggtcgatacatccaagccctttaccgtgacaacgcagttcatcaccaacgacggcaccaccaccggaaccctcaccgagatccgccgccagtacatccagaatggcaaggtgattgcaaacgccgtgtcctcgtctggcgttgactccatcaccgaatcgtggtgtgtatccgtggatggagccgccgcctccttcggcggcctgaccacgatgggtcaggctctgagccgcggtatggtgctagttttcagcatctggaacgacaacagccagttcatgaactggcttgacagcggaagttccggtccttgcagcagcaccgccggcaacccggccaccattgaagcacaggaccccggtacctatgtcaccttctctaacatcaagtggggagacatcggatccacgttccaatcctcttcgggtggatcgagttcgacatcgacgacgacgtcgaccacttccaagcagacgagtaccaccactaccacgaccacgaccacgaccaccaagcctacaagcaccacgaccacagctactggcgcgactcagactcactggggacaatgcggaggagagacttggactggcccaaccgtttgtgctccgccgtactcgtgccagacccagaacccatggtacgctcagtgcttgtaaaaacggtcaaaatcgacaatgttggaggcggggcctccgtacgccttcgctgagctcggcatcaggcttagtatctcccaccatgttttcatcaccttcatgtacataggct

SEQ ID NO: 169 - DNA, 8075 bp, Thermothielavioides terrestris
  source 1..8075: mol_type = genomic DNA
ccagaccagcagaggagataatactctgcgctccgccagggtggccttcaagaaatgcttgaccatcatacacttctccattcacgatgaaccatggcttctcatcgcaggaattctccttgaattcttcaaaaccaatcactcggcttagcccgtctttcttcatattaatgtcttgcacgggctccggctccgtcggctcctctccttcgtgtctttctccccagttaccattcgtcaggtcacccccagcctttttgacgcgttccatccatcctgtaggcatactagggtgggtagggtgctcgaatctcaagttcccgttttccttcgtaattgtaacccggaaccacgggttgttcatcattccgagaacggaccagtacatatcgcgaggctgcacgcccaatgcttcgtccatggctcttacaaggatggcatcactgttctcaagctctgggatggtgatgcttagagaccaaaaacaccagcagaagcaagtttcgcgccagtacatatctactttgcctccaaaaagctcgccttcaaaatcacgatacttgtcttcggcatattcgatttccgccaatctccaagctataagtccgttagctttgataagcattctcacacatcgagcgagcgagggtgcgtacatttgcctttgtctagggatatttctaccctggtaaccctgcggcccccaccggcgtatgcatatcctctgacagtatatgacggccctgccgacaggagatttaagacctcattgttttggggatatgcaacggcggagttggtgtttaggtcataaatcgcataccgctcatcgtgccaccaatttcggttatttgatgccatctcaggcgagaccattgttctgggttagggagttagacaaatgatggaaatataaaataagtgccctttagacatacggtaagacgcggttgtcattgatatggtaccagttgtcgcttggtgcatcggtcaagatcagcctcttcagccacttaacacttcgtcctcctatttgaccgggcacgacggccctcagcggacgaccatgatctgggcgaagagactccccgttcattttatgtgcaagcatgatccccctgttggggtccagggcccagttcaatttaatagatgtgccgtagtgaccattgggctgcggcgaacttagcaattatcatcataagatagaggtacagcataccagcttatccgctccttccatacagacgtatttcgctttacgcaggggtttcgcactgcggagaatatccgccagcaatgggccagtgaagagggcagtcgatagtcccgccgatccccaggaaaaacctttcgttttacgtacaatgttttgctctttgcgtcgattgccagcacatacgagggtgataggcgctgttatttggtcgtactgctgcaacacttgtcggaagtttagtaccaaaggcttctctaccagtctatactttggttaacggatgtttggcagagaacctagcactatactaacccttcgatgctaatttcccagtgagggatatcttcatccttgatatgagggactgggccatgatttcgaacatagaagagctccggcgatgttaaaaaccctttcagagtgtgagaatgtaacggctcaaggggacaagcatgacagccggtgcaagcaacctgataaggataggagtggagcagttataactcataccttctttatacagatctgtgagaggtggctcaacattaaacggatgaacacccgttaatctgataagccgagggtcacgaggaacatggctatctggagttcctttatctacgctcagcacttctgtcggccgttttgatggcggtggcagagggatatcagacaggtctctcgtcgagatctcttcgctttcgattttgatctgacctgtcttaagaacgaggtcagttgggacgagcgcatccgtccgcacctcggtgatggttgccatgttaccggcagggaaggccaatgaaagtaaaattacgagggagggagcatgaacaaggatgctgagtatgaataagtcgaatggtcagccagtgcattaactccaaataaggaggcaatccaccacactaaaatactcttgcctatcgtatgatggcacgcagtacgtgttacccatgcgcgggcagtggacattctattaggtcacggcagtaactccttgttaccatataacgcctcggagaaaggtcacaataagcaatgctcctaggaacccaccagcgatttccgcggagtcccaaaatcagctcattctgggaggtgggacgctcgaaattagggcaagccttcaggctggacggcgtcccaccgcttaaccaagcgttgaggcaaataaatcgcgttgacccacacaacactctcgaggctccagccatttgtccgctcaaccttgcaggatttctttttcgtcatattaattggttctttgaagaatgatggagacaatgccgtgaagccatgtgcaacttccaattagaagtgttgttgcttatcgtccgaatgagcctggttcgcgtggagaatgggccagatgggagctcacggctgttagagcggagctactactctgtacgtacccttcaaaggaattctcggtaagtttgttagagggatattgctcacgtttaattggcactccaggatcctttaaatccaggcaaaaatcgctcgatctggctttttttgccaatcttggaagtctaccgtatacttgtagttacacccttgaggatttaccacatgagaagaacaccaacctaactgcgctgagggtttacgcgcctgaatgtataagctagcttccgttaaattgccgtcgtcagccgttaaattaccgattaatcccgataaatttccgagatctccgttaaattgccgttcgcagccgttaaattaccggggacgaccgataaatttccgcgatgaattcatggtgttttgatcattttaaatttttatatggcgggtggtgggcaactcgcttgcgcgggcaactcgcttaccgattacgttagggctgatatttacgtaaaaatcgtcaagggatgcaagaccaaaccgttaaatttccggagtcaacagcatccaagcccaagtccttcacggagaaaccccagcgtccacatcacgagcgaaggaccacctctaggcatcggacgcaccatccaattagaagcagcaaagcgaaacagcccaagaaaaaggtcggcccgtcggccttttctgcaacgctgatcacgggcagcgatccaaccaacaccctccagagtgactaggggcggaaatttatcgggattaatttccactcaaccacaaatcacagtcgtccccggtaatttaacggctgcagacggcaatttaacggcttctgcgaatcgcttggattccccgcccctggccgtagagcttaaagtatgtcccttgtcgatgcgatgtatcacaacatataaatactggcaagggatgccatgcttggagtttccaactcaatttacctctatccacacttctcttccttcctcaatcctctatatacacaactaccatgcgctctactcccgttcttcgcacaaccctggccgctgcacttcctctggtcgcctccgcggccagtggcagtggccagtccacgagatactgggactgctgcaagccgtcgtgcgcttggcccgggaaggccgccgtcagccaaccggtctacgcgtgcgatgccaacttccagcgcctgtccgacttcaatgtccagtcgggctgcaacggcggctcggcctactcctgcgccgaccagactccctgggcggtgaacgacaatctcgcctacggcttcgccgcgacgagcatcgccggcgggtccgaatcctcgtggtgctgcgcctgctacgcgctcaccttcacttccggtcccgtcgccggcaagacaatggtggtgcagtcaacgagcactggcggcgacctgggatctaaccacttcgatatcgccatgcccggcggcggcgtgggcatcttcaacggctgcagctcgcagttcggcggcctccccggcgctcaatacggcggcatttcgtcgcgcgaccagtgcgattccttccccgcgccgctcaagcccggctgccagtggcggtttgactggttccagaacgccgacaacccgacgttcacgttccagcaggtgcagtgccccgccgagatcgttgcccgctccggctgcaagcgcaacgacgactccagcttccccgtcttcacccccccaagcggtggcaacggtggcaccgggacgcccacgtcgactgcgcctgggtcgggccagacgtctcccggcggcggcagtggctgcacgtctcagaagtgggctcagtgcggtggcatcggcttcagcggatgcaccacctgtgtctctggcaccacctgccagaagttgaacgactactactcgcagtgcctctagctcgagatctagagggtgactgacacctggcggtagacaatcaatccatttcgctatagttaaaggatggggatgagggcaattggttatatgatcatgtatgtagtgggtgtgcataatagtagtgaaatggaagccaagtcatgtgattgtaatcgaccgacggaattgaggatatccggaaatacagacaccgtgaaagccatggtctttccttcgtgtagaagaccagacagacagtccctgatttacccttgcacaaagcactagaaaattagcattccatccttctctgcttgctctgctgatatcactgtcattcaatgcatagccatgagctcatcttagatccaagcacgtaattacatagccgaggtccacagtggagcagcaacattccccatcattgctttccccaggggcctcccaacgactaaatcaagagtatatctctaccgtccaatagatcgtcttcgcttcaaaatctttgacaattccaagagggtccccatccatcaaacccagttcaataatagccgagatgcatggtggagtcaattaggcagtattgctggaatgtcggggccagttggcccggtggtcattggccgcctgtgatgccatctgccactaaatccgatcattgatccaccgcccacgaggcgcgtctttgctttttgcgcggcgtccaggttcaactctctcttataagtcctcagcgtgatttaaaacgccattgctatgatgcttgaagagtgccggatatatcggcatctaacttaggatttgtcttacgtacaatatttatgacctgtggtgaaacctgaggcaacaagggggcgcgatttaccagactggcgttcacataccaatacagtgcttaattgtaggtctcatgggtggaatgagatgaccttccctttcatctattcttaagaggaacagggatggtacccacaccataccccgaagagctcgtgatgtaatagaccctttcgtagtatgcgggtttttattgagatgccgatatgcaaacttgtagtaagactaataataacaggtgcaattaattgaatttggggcctgttaagcttttcgtccgaccaccagtgacgtccgtccgataagccgggaacgatcgataaggaggctatcccgtcgatcctgactaaccttttccagttgttccttaactttgcaccatctccgcggaggaatccctgacccaatcttatggtgaggtgctatcgtccttatcaatccctgtcacgattgccgataacccgtccacatccgatcatggagattaccattgggtgtgtcgctgcatctgctgcgaaaccgcttcgatgaccatcaaccatgaggtgattcgatagtcaaacatctcgccacgacctcatggtgtccacggagatgagaggcccgatcctggatcttggcaccagtagggtcttgccatatcggatgatagatcatgggggacatactccttgataaataaaaacgtccgccaacaccgtgcgttgggcgttgaatctcttccacagtgctatccatcccggacacaatgcctctcctagaagcgcccaggaatgggggcgcagtcaacaatggcgtccttagcggggtgtcgcattctcagagctttggcattgacacagagagtcacttggatgaccctaacagacgccaacagatagtggtggtgggactgggaatggtggctatttccttcctgtaggtgcaccgaagggggacgaggcgatggtcaataatacagttcgggtactgacgataccccccttctccgtatagtgagaaactggtcaagcaagattcagagaggagaaagtacgatatcgttgtgatcggcgaagaacctcacgttgcttacaaccgagtcggcctttcctcgtttttcgaacatcgcaatatcgaggacctctacctcaacccgaaagaatgggtgagtatatcacagctttccctgcgaacttagtgcagcattcgtgctgacgtcaatggattaatccattagtacggatcgttcaaagatcgatcgttcgactatcatctgaacaccagagtaaccgatatatttcctgaccgcaagacggtaaaaacctcaacgggtgacataatcgcctacgatcttcttgttctcgctaccggctctgatgcggtgcttcccactcacactcccggctatgacgccaacggggtttttgtctacagaacgatatcggacctcgagcgccttatcgaatttgcctctaatcacaagggcgagacggcaactactgtcggaggtggcctgctgggactcgaagctgccaaagcaatgacggatctagaagatttcggcaaggtcaagctcattgaccgcaacaagtgggtgctagcaagacaactagacggcgatgccggtaccctagtgacgcggaaaatcagagaactgggcttggatgtgatgcaccagaagcgagtagcgaaaattaagacggatgacaacaacaatgtcacgggtatcgtctttgaggatggggaagaaatagattgctgctgcgtctgttttgctgtacgccgtctaatctcatctcacgtactttcagtttgctaacattacgtatagatcggagtacgacctagagacgagttggggacgactgctggtattcagtgcgcttcacggggtgggtttgttatcaatgaaaggtaacaaccatcgttatgttaagtcttctatcatctaatctgatcttatagtctgcaaacttcgattcccgagatttacgctatcggagagtgtgcaagctgggaaaaccagacgtttggtattattgcacctggcattgaaatggcagatgtgctagcgttcaatttgaccaatcccgataaggaaccaaggagcttcagaagaccggatttaagcactaagctgaagctcttgggagtggatgtcgccagttttggtgacttttttgcggatcgcgatggccccaagttcttgccaggccgtcgaccatcagtcgcaaccattccgcgggtgaaagacacgacggaaaaggagtcaccagtgaaggctctcacgtacaaggatccttttggtggtgtctataagaagtatctattcactatggacggcaaatacctacttggaggaatgatgatcggtgatacaaaggactatatcaaactgaaccaaatggtgaagagccaaaaagagctcgaagttcctccgagccagttcattctgggagctcaaaatggtggggaagaaaacggtgacgacctgtgagctttctctcagatgtccgtgtataacgggtctgctaactatcattcgtacagagccgacgatacccaagtttgctcgtgtcacaacgttaccaaaggtgacatcgtcgaaagtgtcaagagtggcacatgcaagtcaattggagaggtaaagtcatgcacaaaggcaggcactggctgtggaggctgtatgccgttagtgcaatcaattttcaataagaccatgcttgatatgggccaggaggtttcgaataactgtaggtatccttg

SEQ ID NO: 170 - DNA, 8453 bp, Aspergillus niger
  source 1..8453: mol_type = genomic DNA
ccagaccagcagaggagataatactctgcgctccgccagggtggccttcaagaaatgcttgaccatcatacacttctccattcacgatgaaccatggcttctcatcgcaggaattctccttgaattcttcaaaaccaatcactcggcttagcccgtctttcttcatattaatgtcttgcacgggctccggctccgtcggctcctctccttcgtgtctttctccccagttaccattcgtcaggtcacccccagcctttttgacgcgttccatccatcctgtaggcatactagggtgggtagggtgctcgaatctcaagttcccgttttccttcgtaattgtaacccggaaccacgggttgttcatcattccgagaacggaccagtacatatcgcgaggctgcacgcccaatgcttcgtccatggctcttacaaggatggcatcactgttctcaagctctgggatggtgatgcttagagaccaaaaacaccagcagaagcaagtttcgcgccagtacatatctactttgcctccaaaaagctcgccttcaaaatcacgatacttgtcttcggcatattcgatttccgccaatctccaagctataagtccgttagctttgataagcattctcacacatcgagcgagcgagggtgcgtacatttgcctttgtctagggatatttctaccctggtaaccctgcggcccccaccggcgtatgcatatcctctgacagtatatgacggccctgccgacaggagatttaagacctcattgttttggggatatgcaacggcggagttggtgtttaggtcataaatcgcataccgctcatcgtgccaccaatttcggttatttgatgccatctcaggcgagaccattgttctgggttagggagttagacaaatgatggaaatataaaataagtgccctttagacatacggtaagacgcggttgtcattgatatggtaccagttgtcgcttggtgcatcggtcaagatcagcctcttcagccacttaacacttcgtcctcctatttgaccgggcacgacggccctcagcggacgaccatgatctgggcgaagagactccccgttcattttatgtgcaagcatgatccccctgttggggtccagggcccagttcaatttaatagatgtgccgtagtgaccattgggctgcggcgaacttagcaattatcatcataagatagaggtacagcataccagcttatccgctccttccatacagacgtatttcgctttacgcaggggtttcgcactgcggagaatatccgccagcaatgggccagtgaagagggcagtcgatagtcccgccgatccccaggaaaaacctttcgttttacgtacaatgttttgctctttgcgtcgattgccagcacatacgagggtgataggcgctgttatttggtcgtactgctgcaacacttgtcggaagtttagtaccaaaggcttctctaccagtctatactttggttaacggatgtttggcagagaacctagcactatactaacccttcgatgctaatttcccagtgagggatatcttcatccttgatatgagggactgggccatgatttcgaacatagaagagctccggcgatgttaaaaaccctttcagagtgtgagaatgtaacggctcaaggggacaagcatgacagccggtgcaagcaacctgataaggataggagtggagcagttataactcataccttctttatacagatctgtgagaggtggctcaacattaaacggatgaacacccgttaatctgataagccgagggtcacgaggaacatggctatctggagttcctttatctacgctcagcacttctgtcggccgttttgatggcggtggcagagggatatcagacaggtctctcgtcgagatctcttcgctttcgattttgatctgacctgtcttaagaacgaggtcagttgggacgagcgcatccgtccgcacctcggtgatggttgccatgttaccggcagggaaggccaatgaaagtaaaattacgagggagggagcatgaacaaggatgctgagtatgaataagtcgaatggtcagccagtgcattaactccaaataaggaggcaatccaccacactaaaatactcttgcctatcgtatgatggcacgcagtacgtgttacccatgcgcgggcagtggacattctattaggtcacggcagtaactccttgttaccatataacgcctcggagaaaggtcacaataagcaatgctcctaggaacccaccagcgatttccgcggagtcccaaaatcagctcattctgggaggtgggacgctcgaaattagggcaagccttcaggctggacggcgtcccaccgcttaaccaagcgttgaggcaaataaatcgcgttgacccacacaacactctcgaggctccagccatttgtccgctcaaccttgcaggatttctttttcgtcatattaattggttctttgaagaatgatggagacaatgccgtgaagccatgtgcaacttccaattagaagtgttgttgcttatcgtccgaatgagcctggttcgcgtggagaatgggccagatgggagctcacggctgttagagcggagctactactctgtacgtacccttcaaaggaattctcggtaagtttgttagagggatattgctcacgtttaattggcactccaggatcctttaaatccaggcaaaaatcgctcgatctggctttttttgccaatcttggaagtctaccgtatacttgtagttacacccttgaggatttaccacatgagaagaacaccaacctaactgcgctgagggtttaatcctcacacaggaaacagctatgaccatgattacgccaagcttccgttaaattgccgtcgtcagccgttaaattaccgattaatcccgataaatttccgagatctccgttaaattgccgtcgttcaccgttaaattaccgaaatttaccgataaatttccggatctccgttaaattgccgttcgcagccgttaaattaccggggacgaccgataaatttccgcgatgaattcatggtgttttgatcattttaaatttttatatggcgggtggtgggcaactcgcttgcgcgggcaactcgcttaccgattacgttagggctgatatttacgtaaaaatcgtcaagggatgcaagaccaaaccgttaaatttccggagtcaacagcatccaagcccaagtccttcacggagaaaccccagcgtccacatcacgagcgaaggaccacctctaggcatcggacgcaccatccaattagaagcagcaaagcgaaacagcccaagaaaaaggtcggcccgtcggccttttctgcaacgctgatcacgggcagcgatccaaccaacaccctccagagtgactaggggcggaaatttatcgggattaatttccactcaaccacaaatcacagtcgtccccggtaatttaacggctgcagacggcaatttaacggcttctgcgaatcgcttggattccccgcccctggccgtagagcttaaagtatgtcccttgtcgatgcgatgtatcacaacatataaatactggcaagggatgccatgcttggagtttccaactcaatttacctctatccacacttctcttccttcctcaatcctctatatacacaactgggggcagtgagagcgatatgttgaatccgaaggttgcctacatggtctggatgacgtgcctgggtttaacgttgcccagccaggcacagtctaatgattaccgtccttcataccacttcacaccggaccagtactggatgaacgagccaaacggcctgattaaaatcggatccacctggcacctgttctttcaacacaatccgacggccaatgtatggggcaacatatgctgggggcacgctacgagcaccgatctgatgcactgggcacacaaacccactgccattgcggatgagaacggagtcgaagcgtttaccggtacagcctattatgatccaaacaatacctctggccttggggattcggcaaacccaccctatctggcctggttcacaggttataccacttcaagccaaacacaggaccagcgcctggctttcagtgtggataacggggcgacgtggaccaaatttcaaggcaatcccatcatatcaactagccaggaagcaccacatgatataacgggcggcctcgagagtagggatccaaaggtattcttccatcgccaatcggggaactggatcatggttctcgcccatggcgggcaggacaagctgtctttctggacgtctgcagacaccataaactggacatggcagagtgacctgaagtccacctcgatcaatggcctatcgtccgatattacagggtgggaagtccccgacatgtttgaactcccggttgaaggcactgaggagaccacgtgggtggtgatgatgacgccggctgaaggatcccctgccggtggtaacggggtcttagctatcaccggttcttttgacgggaaaagttttacggcagatcccgtcgatgcttcgaccatgtggctggacaatgggcgtgatttcgatggcgctctgagctgggtgaacgtgcctgcgtccgatggacggcggattatcgccgccgtcatgaatagctacggttccaacccgcctacaaccacctggaaagggatgctctcctttccccggacgctgtcgctcaagaaagttggcacgcagcagcactttgttcaacagccgatcacagagttggatacaatcagtaccagtctgcaaatactagcaaaccagaccattacccctggccaaacattgctgtcatcgattcggggaactgctctcgatgttcgagttgctttttaccctgatgctggctcggttctgtccctcgccgtccgaaagggtgcttcggagcaaacagtcattaagtacacccagtcagatgccacattgtcggttgatcgaacagagagtggagatatctcgtatgacccggccgcaggtggcgtccataccgccaagttggaagaggacggcaccggactggtttccatccgggtgttggtggatacgtgttctgtagaggtttttggcggacaaggagaagccgtcatttccgacctcatcttcccgagtgacagttctgacggcctggccttggaggtaactggcggaaatgcagtgctgcagtcggtggacgtgcggagtgtttcacttgaataatcgcagacactgctggcggtagacaatcaatccatttcgctatagttaaaggatggggatgagggcaattggttatatgatcatgtatgtagtgggtgtgcataatagtagtgaaatggaagccaagtcatgtgattgtaatcgaccgacggaattgaggatatccggaaatacagacaccgtgaaagccatggtctttccttcgtgtagaagaccagacagacagtccctgatttacccttgcacaaagcactagaaaattagcattccatccttctctgcttgctctgctgatatcactgtcattcaatgcatagccatgagctcatcttagatccattaagtcctcagcgtgatttaaaacgccattgctatgatgcttgaagagtgccggatatatcggcatctaacttaggatttgtcttacgtacaatatttatgacctgtggtgaaacctgaggcaacaagggggcgcgatttaccagactggcgttcacataccaatacagtgcttaattgtaggtctcatgggtggaatgagatgaccttccctttcatctattcttaagaggaacagggatggtacccacaccataccccgaagagctcgtgatgtaatagaccctttcgtagtatgcgggtttttattgagatgccgatatgcaaacttgtagtaagactaataataacaggtgcaattaattgaatttggggcctgttaagcttttcgtccgaccaccagtgacgtccgtccgataagccgggaacgatcgataaggaggctatcccgtcgatcctgactaaccttttccagttgttccttaactttgcaccatctccgcggaggaatccctgacccaatcttatggtgaggtgctatcgtccttatcaatccctgtcacgattgccgataacccgtccacatccgatcatggagattaccattgggtgtgtcgctgcatctgctgcgaaaccgcttcgatgaccatcaaccatgaggtgattcgatagtcaaacatctcgccacgacctcatggtgtccacggagatgagaggcccgatcctggatcttggcaccagtagggtcttgccatatcggatgatagatcatgggggacatactccttgataaataaaaacgtccgccaacaccgtgcgttgggcgttgaatctcttccacagtgctatccatcccggacacaatgcctctcctagaagcgcccaggaatgggggcgcagtcaacaatggcgtccttagcggggtgtcgcattctcagagctttggcattgacacagagagtcacttggatgaccctaacagacgccaacagatagtggtggtgggactgggaatggtggctatttccttcctgtaggtgcaccgaagggggacgaggcgatggtcaataatacagttcgggtactgacgataccccccttctccgtatagtgagaaactggtcaagcaagattcagagaggagaaagtacgatatcgttgtgatcggcgaagaacctcacgttgcttacaaccgagtcggcctttcctcgtttttcgaacatcgcaatatcgaggacctctacctcaacccgaaagaatgggtgagtatatcacagctttccctgcgaacttagtgcagcattcgtgctgacgtcaatggattaatccattagtacggatcgttcaaagatcgatcgttcgactatcatctgaacaccagagtaaccgatatatttcctgaccgcaagacggtaaaaacctcaacgggtgacataatcgcctacgatcttcttgttctcgctaccggctctgatgcggtgcttcccactcacactcccggctatgacgccaacggggtttttgtctacagaacgatatcggacctcgagcgccttatcgaatttgcctctaatcacaagggcgagacggcaactactgtcggaggtggcctgctgggactcgaagctgccaaagcaatgacggatctagaagatttcggcaaggtcaagctcattgaccgcaacaagtgggtgctagcaagacaactagacggcgatgccggtaccctagtgacgcggaaaatcagagaactgggcttggatgtgatgcaccagaagcgagtagcgaaaattaagacggatgacaacaacaatgtcacgggtatcgtctttgaggatggggaagaaatagattgctgctgcgtctgttttgctgtacgccgtctaatctcatctcacgtactttcagtttgctaacattacgtatagatcggagtacgacctagagacgagttggggacgactgctggtattcagtgcgcttcacggggtgggtttgttatcaatgaaaggtaacaaccatcgttatgttaagtcttctatcatctaatctgatcttatagtctgcaaacttcgattcccgagatttacgctatcggagagtgtgcaagctgggaaaaccagacgtttggtattattgcacctggcattgaaatggcagatgtgctagcgttcaatttgaccaatcccgataaggaaccaaggagcttcagaagaccggatttaagcactaagctgaagctcttgggagtggatgtcgccagttttggtgacttttttgcggatcgcgatggccccaagttcttgccaggccgtcgaccatcagtcgcaaccattccgcgggtgaaagacacgacggaaaaggagtcaccagtgaaggctctcacgtacaaggatccttttggtggtgtctataagaagtatctattcactatggacggcaaatacctacttggaggaatgatgatcggtgatacaaaggactatatcaaactgaaccaaatggtgaagagccaaaaagagctcgaagttcctccgagccagttcattctgggagctcaaaatggtggggaagaaaacggtgacgacctgtgagctttctctcagatgtccgtgtataacgggtctgctaactatcattcgtacagagccgacgatacccaagtttgctcgtgtcacaacgttaccaaaggtgacatcgtcgaaagtgtcaagagtggcacatgcaagtcaattggagaggtaaagtcatgcacaaaggcaggcactggctgtggaggctgtatgccgttagtgcaatcaattttcaataagaccatgcttgatatgggccaggaggtttcgaataactgtaggtatccttg

SEQ ID NO: 171 - DNA, 1415 bp, Aspergillus fumigatus
  source 1..1415: mol_type = genomic DNA
atggtccatctatcttcattggcagcagccctggctgctctgcctctgtatgtttacccactcacgagaggaggaacagctttgacattgctatagtgtatatggagctggcctgaacacagcagccaaagccaaaggactaaagtactttggttccgccacggacaatccagagctcacggactctgcgtatgtcgcgcaactgagcaacaccgatgattttggtcaaatcacacccggaaactccatgaaggtttgcttacgtctgcctccctggagcattgcctcaaaagctaattggttgttttgtttggatagtgggatgccaccgagccttctcagaattctttttcgttcgcaaatggagacgccgtggtcaatctggcgaacaagaatggccagctgatgcgatgccatactctggtctggcacagtcagctaccgaactggggtatgtaaacgtcttgtctattctcaaatactctctaacagttgacagtctctagcgggtcatggaccaatgcgacccttttggcggccatgaagaatcatatcaccaatgtggttactcactacaaggggaagtgctacgcctgggatgttgtcaatgaaggtttgttgctccatctatcctcaatagttcttttgaaactgacaagcctgtcaatctagccctgaacgaggacggtactttccgtaactctgtcttctaccagatcatcggcccagcatacattcctattgcgttcgccacggctgctgccgcagatcccgacgtgaaactctactacaacgactacaacattgaatactcaggcgccaaagcgactgctgcgcagaatatcgtcaagatgatcaaggcctacggcgcgaagatcgacggcgtcggcctccaggcacactttatcgtcggcagcactccgagtcaatcggatctgacgaccgtcttgaagggctacactgctctcggcgttgaggtggcctataccgaacttgacatccgcatgcagctgccctcgaccgccgcaaagctggcccagcagtccactgacttccaaggcgtggccgcagcatgcgttagcaccactggctgcgtgggtgtcactatctgggactggaccgacaagtactcctgggtccccagcgtgttccaaggctacggcgccccattgccttgggatgagaactatgtgaagaagccagcgtacgatggcctgatggcgggtcttggagcaagcggctccggcaccacaacgaccactactactacttctactacgacaggaggtacggaccctactggagtcgctcagaaatggggacagtgtggcggtattggctggaccgggccaacaacttgtgtcagtggtaccacttgccaaaagctgaatgactggtactcacagtgcctgtaa

SEQ ID NO: 172 - DNA, 1720 bp, Evansstolkia leycettana
  source 1..1720: mol_type = genomic DNA
cctggggttcctcgaagctttgtttccaacaactcatcttcctctgagattattgaacttgattcagttctcacgtccttgaacagacacttcctccaagatggtccatctttcttccctggccctggctttggccgccggctcgcagctgtatgtgatccatgccatgactcgagaagtgctcccaaaactgactccaagtctcaatcttagtgcccaagctgcaggtcttaacactgctgccaaagcgattggaaagctctatttcggtaccgcaaccgacaacccggagctgtccgacagcacatacatgcaggagacggataacaccgatgatttcggccaactcaccccagctaactccatgaaggttcgctgacatcttagttcccccccccttttgggaatctgcgcggagatatgctgagccttcaaaactagtgggatgccaccgagccctctcagaacaccttcaccttcaccaacggtgatcagatcgcaaaccttgctaagagcaacggtcagatgctgagatgccacaacctggtgtggtacaaccagttgcccagctggggtaagcaaccggttctgttaatatcatcagcgtgaccgcatcgatcgtattgcgcggagattggaaagatttgcaagctaatgtcactacagtcaccagcggatcttggaccaatgccacgcttcttgcggccatgaagaaccacatcaccaacgttgtgacccactacaagggacagtgctacgcttgggatgttgtcaacgaaggtacgtttcgattcggcttccctcggaccgtatctgcaggcaaaaaggtcaatcaattgacaatcgtgatccccagctctcaacgatgatggcacctaccgatccaatgtcttctatcagtacatcggcgaggcatacattcccattgcctttgcgaccgctgccgccgccgatccaaacgcgaagctctactacaacgactacaacattgagtaccccggcgccaaggccaccgccgcccagaacatcgtcaagatggtcaaggcttacggcgcgaaaatcgacggtgtcggtctgcaatctcacttcatcgttggcagcacccctagccagagctcccagcagagcaacatggctgctttcaccgcgctcggcgtcgaggtcgccatcaccgaactggatatccgcatgacgttgccttccaccagtgctctcttggcccagcaatccaccgattaccagagcactgtgtcggcttgcgtgaacactccgaagtgcattggtatcaccctctgggactggaccgacaagtactcctgggttcccaacaccttctccggccaaggtgacgcctgcccctgggattctaactaccagaagaagcctgcctactacggtatcttgactgcgctcggaggcagcgcttccacctccaccaccaccactctggtgacctccaccaggacttcgactacgaccagcacttcggccacctccacgtctactggcgttgctcagcactggggccagtgcggtggtatcggctggacagggccgactacctgcgctagcccctacacctgccaggaactgaatccctactactaccagtgcctgtaaatgacgtcttgacgctgaattggggagctttggccccatagaatccgtatcgggaaaaagtatgagcgcgtcaagcggtcgtgtatcaaagcatcatgtg

SEQ ID NO: 173 - DNA, 9167 bp, Bacillus sp.
  source 1..9167: mol_type = genomic DNA
aattcagaaatactcctagaataaaaaaactcatctttaaagatgagctgtccattccataaaaaattacattgtaatcatgtccagaaaatgatcaatcacaatggaggacattcctaatgccggtgcattctgtcctaaggaagatggcaataattcatagctattgcctaattgggaataaacccttgatgatacttcacttctcattgaatttaaaaccataggatgcgattcaattatgctatttcttaaaattacggcttgtgggttgaaagtatttagaatattggtaaggcctattcctaaatagaatccaaaattttgtaatgcatttaaggttccgatatcattcagatgggcgaggtttatgatatcttgataggacagttttttctctttggtctgaagagattttaataaagccttctctgaagcatacaattcccagcatcctcggtttccgcaactgcatttaggaccattaaagtctattgtcatatgtcccatttctccagagaagccgcttactcctctatataaatgattgttgataataacaccgatccctattcctgtgctgatacttacgtaaataatgttatcgtgattttttgcagctccaaatagtttttctccatatgcgccagcatttgcctcattttcaataaaaacagacacattgtacttctcttgtatcgaagattttaagtcaatatctctccagttggagttcggagtgaaaacaattttttgatctttatcaatgagtccaggcacgcaaatacctataccaataaacccgtacggagattggggcatttgcgtaataaagtgatgaatcatatcaatcaaaatgtctttcgttatttctggagaattggattccaaatggcggtattgatcaagaacgattgttccttcaaggtctgttaaaatgccattaatataatccacaccaacatctattccaacggagtatcctgcctttttattaaaaacaagcatgacaggtcttcttccgccacttgattgtccttgacctatttcaaataccatactttctttcattaacgtgtttacctgtgatgagacagttgatttatttaatccagtcatttcagataattttgctcttgaaataggtgaatttttaaggatttcttttaataataacttttgatttacttttttgacaaaggtttgatcagcgatatccacttcatccactccatttgtttaatctttaaattaagtatcaacatagtacatagcgaatcttccctttattaaatctaatgtgttcataaaaaactaaaaaaaatattgaaaatactgacgaggttatataagatgaaaataagttagtttgtttaaacaacaaactaataggtgatgtacttactatatgaaataaaatgcatctgtatttgaatgaatttatttttaagggggaaatctcatgactaagaaagtagcaatctatacacgagtatccactactaaccaagcagaggaagggttctcaattgatgagcaaattgaccgtttaacaaaatatgctgaagcaatggggtggcaagtatctgatacttatactgatgctggtttttcaggggccaaacttgaacgcccagcaatgcaaagattaatcaacgatatcgagaataaagcttttgatacagttcttgtatataagctagaccgcctttcacgtagtgtaagagatactctttatcttgttaaggatgtgttcacaaaaaataaaatagactttatctcgcttaatgaaagtattgatacttcttctgctatgggtagcttgtttctcactattctttctgcaattaatgagtttgaaagagagaatataaaagaacgcatgactatgggtaaactagggcgagcgaaatctggtaagtctatgatgtggactaagacagcttttgggtattaccacaacagaaagacaggtatattagaaattgttcctttacaagctacaatagttgaacaaatattcactgattatttatcaggaatatcacttacaaaattaagagataaactcaatgaatctggacacatcggtaaagatataccgtggtcttatcgtaccctaagacaaacacttgataatccagtttactgtggttatatcaaatttaaggacagcctatttgaaggtatgcacaaaccaattatcccttatgagacttatttaaaagttcaaaaagagctagaagaaagacaacagcagacttatgaaagaaataacaaccctagacctttccaagctaaatatatgctgtcagggatggcaaggtgcggttactgtggagcacctttaaaaattgttcttggccacaaaagaaaagatggaagccgcactatgaaatatcactgtgcaaatagatttcctcgaaaaacaaaaggaattacagtatataatgacaataaaaagtgtgattcaggaacttatgatttaagtaatttagaaaatactgttattgacaacctgattggatttcaagaaaataatgactccttattgaaaattatcaatggcaacaaccaacctattcttgatacttcgtcatttaaaaagcaaatttcacagatcgataaaaaaatacaaaagaactctgatttgtacctaaatgattttatcactatggatgagttgaaagatcgtactgattcccttcaggctgagaaaaagctgcttaaagctaagattagcgaaaataaatttaatgactctactgatgtttttgagttagttaaaactcagttgggctcaattccgattaatgaactatcatatgataataaaaagaaaatcgtcaacaaccttgtatcaaaggttgatgttactgctgataatgtagatatcatatttaaattccaactcgcttaagcttgcatgcctgcaggtcgattcacaaaaaataggcacacgaaaaacaagttaagggatgcagtttatgcatcccttaacttacttattaaataatttatagctattgaaaagagataagaattgttcaaagctaatattgtttaaatcgtcaattcctgcatgttttaaggaattgttaaattgattttttgtaaatattttcttgtattctttgttaacccatttcataacgaaataattatacttttgtttatctttgtgtgatattcttgatttttttctacttaatctgataagtgagctattcactttaggtttaggatgaaaatattctcttggaaccatacttaatatagaaatatcaacttctgccattaaaagtaatgccaatgagcgttttgtatttaataatcttttagcaaacccgtattccacgattaaataaatctcattagctatactatcaaaaacaattttgcgtattatatccgtacttatgttataaggtatattaccatatattttataggattggtttttaggaaatttaaactgcaatatatccttgtttaaaacttggaaattatcgtgatcaacaagtttattttctgtagttttgcataatttatggtctatttcaatggcagttacgaaattacacctctttactaattcaagggtaaaatggccttttcctgagccgatttcaaagatattatcatgttcatttaatcttatatttgtcattattttatctatattatgttttgaagtaataaagttttgactgtgttttatatttttctcgttcattataaccctctttaatttggttatatgaattttgcttattaacgattcattataaccacttattttttgtttggttgataatgaactgtgctgattacaaaaatactaaaaatgcccatattttttcctccttataaaattagtataattatagcacgagcactgataaatatgaacatgatgagtgatcgttaaatttatactgcaatcggatgcgattattgaataaaagatatgagagatttatctaatttcttttttcttgtaaaaaaagaaagttcttaaaggttttatagttttggtcgtagagcacacggtttaacgacttaattacgaagtaaataagtctagtgtgttagactttatgaaatctatatacgtttatatatatttattatccggaggtgtagcatgtctcattcaattttgagggttgccagagttaaaggatcaagtaatacaaacgggatacaaagacataatcaaagagagaataaaaactataataataaagacataaatcatgaggaaacatataaaaattatgatttgattaacgcacaaaatataaagtataaagataaaattgatgaaacgattgatgagaattattcagggaaacgtaaaattcggtcagatgcaattcgacatgtggacggactggttacaagtgataaagatttctttgatgatttaagcggagaagaaatagaacgattttttaaagatagcttggagtttctagaaaatgaatacggtaaggaaaatatgctgtatgcgactgtccatctggatgaaagagtcccacatatgcactttggttttgtccctttaacagaggacgggagattgtctgcaaaagaacagttaggcaacaagaaagactttactcaattacaagatagatttaatgagtatgtgaatgagaaaggttatgaacttgaaagaggcacgtccaaagaggttacagaacgagaacataaagcgatggatcagtacaagaaagatactgtatttcataaacaggaactgcaagaagttaaggatgagttacagaaggcaaataagcagttacagagtggaatagagcatatgaggtctacgaaaccctttgattatgaaaatgagcgtacaggtttgttctctggacgtgaagagactggtagaaagatattaactgctgatgaatttgaacgcctgcaagaaacaatctcttctgcagaacggattgttgatgattacgaaaatattaagagcacagactattacacagaaaatcaagaattaaaaaaacgtagagagagtttgaaagaagtagtgaatacatggaaagaggggtatcacgaaaaaagtaaagaggttaataaattaaagcgagagaatgatagtttgaatgagcagttgaatgtatcagagaaatttcaagctagtacagtgactttatatcgtgctgcgagggcgaatttccctgggtttgagaaagggtttaataggcttaaagagaaattctttaatgattccaaatttgagcgtgtgggacagtttatggatgttgtacaggataatgtccagaaggtcgatagaaagcgtgagaaacagcgtacagacgatttagagatgtagaggtacttttatgccgagaaaactttttgcgtgtgacagtccttaaaatatacttagagcgtaagcgaaagtagtagcgacagctattaactttcggtttcaaagctctaggatttttaatggacgcagcgcatcacacgcaaaaaggaaattggaataaatgcgaaatttgagatgttaattaaagacctttttgaggtctttttttcttagatttttggggttatttaggggagaaaacataggggggtactacgacctcccccctaggtgtccattgtccattgtccaaacaaataaataaatattgggtttttaatgttaaaaggttgttttttatgttaaagtgaaaaaaacagatgttgggaggtacagtgatggttgtagatagaaaagaagagaaaaaagttgctgttactttaagacttacaacagaagaaaatgagatattaaatagaatcaaagaaaaatataatattagcaaatcagatgcaaccggtattctaataaaaaaatatgcaaaggaggaatacggtgcattttaaacaaaaaaagatagacagcactggcatgctgcctatctatgactaaattttgttaagtgtattagcaccgttattatatcatgagcgaaaatgtaataaaagaaactgaaaacaagaaaaattcaagaggacgtaattggacatttgttttatatccagaatcagcaaaagccgagtggttagagtatttaaaagagttacacattcaatttgtagtgtctccattacatgatagggatactgatacagaaggtaggatgaaaaaagagcattatcatattctagtgatgtatgagggtaataaatcttatgaacagataaaaataattacagaagaattgaatgcgactattccgcagattgcaggaagtgtgaaaggtcttgtgagatatatgcttcacatggacgatcctaataaatttaaatatcaaaaagaagatatgatagtttatggcggtgtagatgttgatgaattattaaagaaaacaacaacagatagatataaattaattaaagaaatgattgagtttattgatgaacaaggaatcgtagaatttaagagtttaatggattatgcaatgaagtttaaatttgatgattggttcccgcttttatgtgataactcggcgtatgttattcaagaatatataaaatcaaatcggtataaatctgaccgatagattttgaatttaggtgtcacaagacactcttttttcgcaccagcgaaaactggtttaagccgactgcgcaaaagacataatcgactctagaggatctttagttaccttaattgaaataaacgaaataaaaactcgcaattaagcgagttggacaacgaaatttataagacgggcaaaataaaaaaacggatttccttcaggaaatccgtcctctctgctcttctagtggatccttatggaagatacattgcgaacttgccgttcgcaacaagagagttaagcatgtaaagacaagagccgtagtagtcctctgggatgtatgtagagttaaacgcgttagcgaagcccgtgcgaagtgatgcgtcagatgctgccgttgcgccaccagcgtttgctgcgataaggccaacaggagagcctttctttactgctgtgccgttaagtgtatactcatgggcagtgcgaccatagttctcgcgcttcatgaatgtaagaaacttgttaacagccttttgctcagatgcgcgatatgcgttgtcagctgagctccaaagagtatggtccatagcgatatgagatacagtgcgccaagcgtcgtaagagaagttgcggtctgtctctgttgaagaatgagcagcgtctgaaacgccgtcaaagccagcctcgtcaggaaaaaggccagtagcagcgttagtaactgttgagccgttgttaagtacagacttgaaagttgtctcgctaaggtacgtgcgagatttgttagctgcgtccttccagaagtattgttgtgatgacttagctgacttggcgaaaagctcgaagaaagccggaacatgataagatgggtcagtccagttaacgtaagggccaaagcgtaccatagcatagcgttggtccttgctgtttttgatgaaaacgcgagactccttgcctgtgttagcgtactcgccgtcgcctgcaagtgcgtcaagcatgtcttgagcgcgtgccttgtagtcgtaagggtacttcttgtcaccccagcgaccagaagccatcataagtgcagctgcaaaccatacctcgccgtctgacgcaacgttttggtcgatcgtttgaacgtctgagccgtttgttttcatatgccaagagtgatagccgtaaaggctgtcgttgcggtctgaatggcgcatgtacttgcgaacgaagtcccaaagcttttgaaacttgtactcgtcgttcatttgaagcgtgatcatcatgccgtatgacatgccctcagtctttacagagtaatagccgttgccaagcaggttgtcgtctgttgtagaagcgatgtaagcagagccgtccttcatatagtgaaaaagagagccacctttgccgtcgccctttgtgtcgaaatacttcttgtaagcctggttaaggttgttcttgccagttgtgccaaggatgtctggagtctttgaatgtacagcagccgatgcgatcgatgaactaaaagcaacagaaatgagtagtgcggtgcttgcgacaattttccccaacggtttcttcattctttatcctctcctttttttcatacctccataatacataattttcaaactgataaaatgatttttcataaatccattagacggtgcaaatatatgtttttaatgttcttcgtttttaggcatccctcctttcaagataaataatttatacactattctattggaatcttaatcattccaatagaaaaatatgtaatgattataaataagtcgcttcttatcataaatatatttacatattcatttaatactacatcatgttaggtatagtaaggctatcaagggtgtcttaatttctacttgtaacaatgtattggcatattatatattgaattgagaaaattaaatacagcgataattcacatgaacaagttcattggtagttatattttcaaattttcaaggttgtgcttgtatgtcattctatagttagataagcatttgaggtagagtccgtccgaatatatttgtaatctgaagaaggttcaaacatatttctatataacgtattctttttttgtagttcttacttttgaggggcgttacaattcaaagatattatctttaatgtgaggcattttcgctctttccggcaaccacttccaagtaaagtataacacactatactttatattcataaagtgtgtgctctgcgaggctgtcggcagtgccgaccaaaaccataaaacctttaagacctttcttttttttacgagaaaaaagaaacaaaaaaacctgccctctgccacctcagcaaaggggggttttgctctcgtgctcgtttaaaaatcagcaagggacaggtagtattttttgagaagatcactcaaaaaatctccacctttaaacccttgccaatttttattttgtccgttttgtctagcttaccgaaagccagactcagcaagaataaaatttttattgtctttcggttttctagtgtaacggacaaaaccactcaaaataaaaaagatacaagagaggtctctcgtatcttttattcagcaatcgcgcccgattgctgaacagattaataatgagcacg

SEQ ID NO: 174 - DNA, 7061 bp, unidentified
  source 1..7061: mol_type = genomic DNA
tcgcgcgtttcggtgatgacggtgaaaacctctgacacatgcagctcccggagacggtcacagcttgtctgtaagcggatgccgggagcagacaagcccgtcagggcgcgtcagcgggtgttggcgggtgtcggggctggcttaactatgcggcatcagagcagattgtactgagagtgcaccatatgcggtgtgaaataccgcacagatgcgtaaggagaaaataccgcatcaggcgccattcgccattcaggctgcgcaactgttgggaagggcgatcggtgcgggcctcttcgctattacgccagctggcgaaagggggatgtgctgcaaggcgattaagttgggtaacgccagggttttcccagtcacgacgttgtaaaacgacggccagtgaattcagtactactacaaaaaaagaatacgttatatagaaatatgtttgaaccttcttcagattacaaatatattcggacggactctacctcaaatgcttatctaactatagaatgacatacaagcacaaccttgaaaatttgaaaatataactaccaatgaacttgttcatgtgaattatcgctgtatttaattttctcaattcaatatataatatgccaatacattgttacaagtagaaattaagacacccttgatagccttactatacctaacatgatgtagtattaaatgaatatgtaaatatatttatgataagaagcgacttatttataatcattacatatttttctattggaatgattaagattccaatagaatagtgtataaattatttatcttgaaaggagggatgcctaaaaacgaagaacattaaaaacatatatttgcaccgtctaatggatttatgaaaaatcattttatcagtttgaaaattatgtattatggagctctataaaaatgaggagggaaccgaatgaagaaaccgttggggaaaattgtcgcaagcaccgcactactcatttctgttgcttttagttcatcgatagcatcagcacatcatcatcaccatcatcctaggacccccgccgcacagtcggccgcatcccccgccgcggccgaggccgcccccacggcggcgggcgacaaggtgatcggatacttcaccaactggggtacgtacgaccgcaattaccacgtcaagaacatcgagacatcgggttcagcggacaagctcacccacatcaactacgccttcggcaacgtcatcggcggcaagtgcacgatcggcgactcctacgccgactacgagaaggcctacacggccgaccagtcggtcgacggggtcgccgacacctgggaccagccgctgcgcggcaacttcaaccagctgcgcaagctgaagaagctccacccggacctcaagatcctctggtccttcggcggctggacctggtccggcggcttcggccaggcggcgcagaacccggccgccttcgcgaagtcctgccgcgacctggtggaggacccccgctgggccgatgtcttcgacggcatcgacatcgactgggagtaccccaacgcctgcggtctcacctgtgacaccagcggccgcgacgcgtacggcaacctgctgggcgagctgcgcaagtccttcgggaccgacctggtcacctcggcgatcacggcggacggctccgacggcggcaagatcgacgcggtggactacgcgggggcggcgaagcacctcgactggtacctgccgatgacatacgacttcttcggcgcctgggaggcgaaggggccgacggcaccgcactccccgctgacctcctacccgggcgtcccgacggagggcttcaactccgacgccgcgatctccaagctgaagtccctcggcatcccgccggagaagctgctgctgggcatcggcttctacggccgcggctggacgggcgtcacccggtccgagccgggcggcagcgctaccggtgcggcggcgggtacgtacgaagcgggcatcgaggactaccgggtcctcaagaacagctgccccgccacgggcaaggtggccggtacggcgtacgcgcactgcggcaccgactggtggagctacgacaccccggagaccatcggctccaagatgaactacaagaacgaacagggcctgggaggcacgttcttctgggagctgagcggtgacaccgggaacggtgagctgatcaaggcgatccgctagtaaacgcgttaatcaataaaaaaacgctgtgcggttaaagggcacagcgtttttttgtgtatcggcaatagttacccttattatcaagataagaaagaaaaggatttttcgctacgctcaaatcctttaaaaaaacacaaaagaccacattttttaatgtggtctttattcttcaactaaagcacccattagttcaacaaacgaaaattggataaagtgggatatttttaaaatatatatttatgttacagtaatattgacttttaaaaaaggattgattctaatgaagaaagcagacaagtaagcctcctaaattcactttagataaaaatttaggaggcatatcaaatgaactttaataaaattgatttagacaattggaagagaaaagagatatttaatcattatttgaaccaacaaacgacttttagtataaccacagaaattgatattagtgttttataccgaaacataaaacaagaaggatataaattttaccctgcatttattttcttagtgacaagggtgataaactcaaatacagcttttagaactggttacaatagcgacggagagttaggttattgggataagttagagccactttatacaatttttgatggtgtatctaaaacattctctggtatttggactcctgtaaagaatgacttcaaagagttttatgatttatacctttctgatgtagagaaatataatggttcggggaaattgtttcccaaaacacctatacctgaaaatgctttttctctttctattattccatggacttcatttactgggtttaacttaaatatcaataataatagtaattaccttctacccattattacagcaggaaaattcattaataaaggtaattcaatatatttaccgctatctttacaggtacatcattctgtttgtgatggttatcatgcaggattgtttatgaactctattcaggaattgtcagataggcctaatgactggcttttataatatgagataatgccgactgtactttttacagtcggttttctaatgtcactaacctgccccgttagttgaagaaggtttttatattacagctccagatcttaattaatcaccgaaatattatggaagaaaatatcagcaccatgacggccaaacggatgcttccaacggtgctaactatatcacgatgtcctacaactattatcacgatcatgataaaagctccattttcggatcaagtgacagcaaaacctccgatgacggcaaattaaaaattacgctgcatcataaccgctataaaaatattgtccagcgcgcgccgagagtccgcttcgggcaagtgcacgtatacaacaactattatgaaggaagcacaagctcttcaagttatccttttagctatgcatggggaatcggaaagtcatctaaaatctatgcccaaaacaatgtcattgacgtaccgggactgtcagctgctaaaacgatcagcgtattcagcgggggaacggctttatatgactccggcacgttgctgaacggcacacagatcaacgcatcggctgcaaacgggctgagttcttctgtcggctggacgccgtctctgcatggattgattgatgcttctgctaatgtgaaatcaaatgttataaatcaagcgggtgcgggtaaattaaattaagaaagtgaaaaacacaaagggtgctaacctgcggccgcgatgcttaggaagacgagttattaatagctgaataagaacggtgctctccaaatattcttatttagaaaagcaaatctaaaattatctgaaaagggaatgagaatagtgaatggaccaataataatgactagagaagaaagaatgaagattgttcatgaaattaaggaacgaatattggataaatatggggatgatgttaaggctattggtgtttatggctctcttggtcgtcagactgatgggccctattcggatattgagatgatgtgtgtcatgtcaacagaggaagcagagttcagccatgaatggacaaccggtgagtggaaggtggaagtgaattttgatagcgaagagattctactagattatgcatctcaggtggaatcagattggccgcttacacatggtcaatttttctctattttgccgatttatgattcaggtggatacttagagaaagtgtatcaaactgctaaatcggtagaagcccaaacgttccacgatgcgatttgtgcccttatcgtagaagagctgtttgaatatgcaggcaaatggcgtaatattcgtgtgcaaggaccgacaacatttctaccatccttgactgtacaggtagcaatggcaggtgccatgttgattggtctgcatcatcgcatctgttatacgacgagcgcttcggtcttaactgaagcagttaagcaatcagatcttccttcaggttatgaccatctgtgccagttcgtaatgtctggtcaactttccgactctgagaaacttctggaatcgctagagaatttctggaatgggattcaggagtggacagaacgacacggatatatagtggatgtgtcaaaacgcataccattttgaacgatgacctctaataattgttaatcatgttggttacgtaagtactaagcttggcgtaatcatggtcatagctgtttcctgtgtgaaattgttatccgctcacaattccacacaacatacgagccggaagcataaagtgtaaagcctggggtgcctaatgagtgagctaactcacattaattgcgttgcgctcactgcccgctttccagtcgggaaacctgtcgtgccagctgcattaatgaatcggccaacgcgcggggagaggcggtttgcgtattgggcgctcttccgcttcctcgctcactgactcgctgcgctcggtcgttcggctgcggcgagcggtatcagctcactcaaaggcggtaatacggttatccacagaatcaggggataacgcaggaaagaacatgtgagcaaaaggccagcaaaaggccaggaaccgtaaaaaggccgcgttgctggcgtttttccataggctccgcccccctgacgagcatcacaaaaatcgacgctcaagtcagaggtggcgaaacccgacaggactataaagataccaggcgtttccccctggaagctccctcgtgcgctctcctgttccgaccctgccgcttaccggatacctgtccgcctttctcccttcgggaagcgtggcgctttctcaatgctcacgctgtaggtatctcagttcggtgtaggtcgttcgctccaagctgggctgtgtgcacgaaccccccgttcagcccgaccgctgcgccttatccggtaactatcgtcttgagtccaacccggtaagacacgacttatcgccactggcagcagccactggtaacaggattagcagagcgaggtatgtaggcggtgctacagagttcttgaagtggtggcctaactacggctacactagaaggacagtatttggtatctgcgctctgctgaagccagttaccttcggaaaaagagttggtagctcttgatccggcaaacaaaccaccgctggtagcggtggtttttttgtttgcaagcagcagattacgcgcagaaaaaaaggatctcaagaagatcctttgatcttttctacggggtctgacgctcagtggaacgaaaactcacgttaagggattttggtcatgagattatcaaaaaggatcttcacctagatccttttaaattaaaaatgaagttttaaatcaatctaaagtatatatgagtaaacttggtctgacagttaccaatgcttaatcagtgaggcacctatctcagcgatctgtctatttcgttcatccatagttgcctgactccccgtcgtgtagataactacgatacgggagggcttaccatctggccccagtgctgcaatgataccgcgagacccacgctcaccggctccagatttatcagcaataaaccagccagccggaagggccgagcgcagaagtggtcctgcaactttatccgcctccatccagtctattaattgttgccgggaagctagagtaagtagttcgccagttaatagtttgcgcaacgttgttgccattgctacaggcatcgtggtgtcacgctcgtcgtttggtatggcttcattcagctccggttcccaacgatcaaggcgagttacatgatcccccatgttgtgcaaaaaagcggttagctccttcggtcctccgatcgttgtcagaagtaagttggccgcagtgttatcactcatggttatggcagcactgcataattctcttactgtcatgccatccgtaagatgcttttctgtgactggtgagtactcaaccaagtcattctgagaatagtgtatgcggcgaccgagttgctcttgcccggcgtcaatacgggataataccgcgccacatagcagaactttaaaagtgctcatcattggaaaacgttcttcggggcgaaaactctcaaggatcttaccgctgttgagatccagttcgatgtaacccactcgtgcacccaactgatcttcagcatcttttactttcaccagcgtttctgggtgagcaaaaacaggaaggcaaaatgccgcaaaaaagggaataagggcgacacggaaatgttgaatactcatactcttcctttttcaatattattgaagcatttatcagggttattgtctcatgagcggatacatatttgaatgtatttagaaaaataaacaaataggggttccgcgcacatttccccgaaaagtgccacctgacgtctaagaaaccattattatcatgacattaacctataaaaataggcgtatcacgaggccctttcgtc

SEQ ID NO: 175 - DNA, 2875 bp, Streptomyces griseus
  source 1..2875: mol_type = genomic DNA
ccgacgcccgcgatctgctggaggcggtacggacggtggcgcgcggcgaggggctgatcgccccggccgtgacccgtcggctgatcgcggagttcgccggggcgacggccgtacgcggccgggggacggccgatccggcggtgctggacgtgctcacccggcgcgagcgcgaggtgctggggtgcctgggcgagggcctgtcgaacgcggagatcgcgctgcgcctcgcgatggccgaggccacggtgaagacccacgtcagtaggctgctgggcaagctggagctgcggagccgggttcaggcagccgtcctggcgcaggagttggggattcgagccgactcctgatctttggtccagacctcttgacgattggtccagaccttcctactgtcaccgtcacacactgcggtgagtacgagagcacccgtactcagggcggcgcagggtttgcagtccacgaatcacccccgtttgttggacctcacccgaggagcaccgttgagcactgataccccccaacgccgatccagattcagatggatccccgtccggagcggccggtccaaggtcgtcgcgggcctgaccgcgctggtcgtgccgctggccgcgatggtggggctcgccgccccggcctcggcagccgcgtcggccaccgccacgtacaccaagaagtcggactggggcagcggcttcgagggccagtggacggtgaagaacaccggcaccaccgcgctctcctcctggaccatcgagtgggacttcccctcgggcaccacggccggctccgcctgggacgccgccctcaccagcagcggcggccactacaccgccaagaacctttcctggaacgggtccgtggcgcccggcgccagcatcagcttcggcttcaacggcaccggctccggctcccccacgggctgcaagctgaacggcgcctcctgtgacggcggccccaccgtccccggtgacaacccgcccacggcccccggcgccccgaccaccagcgacgtcaccgacacctcggtcaagctcagctggagcgcggcgaccgacgacaagggcgtcaagaactacgacgtcctgcgggacggcgcgaaggtcgccacggtcaccggcaccacgtacaccaacaccggcctgaccgcgggcaccgactactcctacgccgtgcaggcccgggacaccgccgaccagaccggcccggtctccggcgccgtctccgtgcgcaccaccggcggcggtggcgagcagcccggcggcgacaaggtcaacctgggctacttcaccaactggggcgtctacgggcgcaactaccacgtcaagaacctggtgacgtccggctcggccgcgaagatcacgcacatcaactacgccttcggcaacgtgcagaacggcaagtgcaccatcggcgactcgtacgccgactacgacaaggcgtacaccgccgaccagtccgtcgacggcgtcgccgacacctgggaccagcccctgcgcggcaacttcaaccagctgcgcaagctgaaggccaagtacccgcacatcaagatcctctggtccttcggcggctggacctggtccggcggcttcggccaggccgtgcagaaccccgccgccttcgcccagtcctgctacgacctggtcgaggacccccgctgggccgatgtcttcgacggcatcgacctcgactgggagtaccccaacgcctgtggtctgacctgtgacaccagcggtccggccgcgctcaagaccatggccgacgccatgcgggcgaagttcggcacgaagaacctggtcaccgccgccatcaccgcggacggctccaacggcggcaagatcgacgcggccgactacggcggcgcctcccagtccttcgactggtacaacgtgatgacgtacgacttcttcggcgcctgggcggccaagggcccgacggccccgcactctccgctgaccccgtacaccggcatcccgcaggccggcttctcctcctccgaggccatcgccaagctgaaggccaagggcgtcccggccaagaagctgctcctcggcatcggcttctacggccgcggctggaccggcgtcacccagtccgcccccggcggcacggcgaccggcgcggccccgggcacgtacgaggcgggcaacgaggactacaaggtcctgaagaacacctgcccgtccaccggcaccatcgccggtacggcctacgcgcactgcggcaccaactggtggagctacgacaccccggcgaccatcggcaccaagatgacctgggcgaagaaccagggcctcggtggcgcgttcttctgggagttctccggtgacaccagcaacggtgaactggtgaacgcgatcaagaccggcctccagtaagcaccgcggtgctccccccgccgtaacggcaagcaccaccccggaaaagcaccggggagacgggtccgccccccgtctccccggtttttcgctgtgtacgcagacgttctccggctacgcgctccgctgcgcgacgtacgcgttacgcgccgtcctcaggctctgtcctcaggctctgtcctcaggctctgtcctcaggctctacgcgacgttcacccgctggccgggcggcgccgcctccagccaggcgaggaagccggtcagggcgtcctcgctcatcgccagctccaggcgcgtcccgcggtggagacagccgagcacgacggagtcggacaggagcgcgagctcctcctcgccctccggcagccggcgggcgatcacctcgatcgcagaacgctccaggccccggcgggggcgaggagcgtaggagaagacccggaaccagtcgacgcggtcaccgctgtagcgggcgaccccgtacacccagcccttgccgagcg

SEQ ID NO: 176 - DNA, 2728 bp, Streptomyces griseus
  source 1..2728: mol_type = genomic DNA
agatctcccacaagatcacccgtgcggggtgcgatgtacggtcccggaggcgttcccggcggaaaaaaccccggtccggcaccctccacggaccctcgggcaccccgtcgccgacccctcggcgcgacctcgcggccaccctcgcggaaggcttttcaccgccagaggtcttgacaacttgattggtctggaccagttttatgcgccaagcggtggccaccgctcccggcaggacacctcgtgttccatgtccccggttcagcaccccctgcacgaccgccgtacgacacccccgatcgcccccgatcaaccccgatcaaccccgattcaccgcgcttacggtgcttcaccgtgcccaccgtgcttcatcgtgcttcaccgtgattcgtcgtcacagatccccgcttctcccggcccacccgtgcagccccggcccgtcgtccgtccggccctcctgcacgacccccgccaggaccaccaactcccccacggaggaaccagtggaacgctccgcaggcagcagtcgcagaaggcggcgctcccgtcccgtgctcggcggcaccatggccgtcgtcgcggccgcggccctgaccgtcaccgggctcgtcagcacggcccaggccgccgacgtcaacaacgccaggaacgcgggcttcgagtcgggcctcgccaactggacctgcgccgggaacagcggcgccatcgtctcctcccccgtgcacggcggtacgtccgcgctgaaggccaccccggccggccaggacaacgccaagtgttcgcaggccgtcaaggtgaagcccaactcgacgtacgcgctcagctcctgggtgcagggcggctacgcctacctcggcgtgagcggcaccggaaccaccgacgtgtccacctggacgccgggctccaccacctggaccaagctgtccaccagcttcaagaccggcgcgaacaccacctcggtgaccgtctacacccacggctggtacgggcaggccgcctacctcgccgacgacttcgaggtgaccggccccgacggcggtggcggcgaggagcccggcccggtcatcccggcggctcccggcggcctcgcggcgggcgccaccaccacgtcctccgtctccctctcctggaacgcggtctccggcgccaccggatacacggtgtaccgggacggcacgaaggccaccacctccaccggaacctcggcgaccgtcacgggcctcaccgcggacaccgcctaccagttctcggtgagcgccaccaacgcggccggtgagtcggtcaagtcggccgccatcagcgcccgtacggccaagcagggcacgggccccggccccgggccctccgtgcccaagcacgcggtgaccggctactggcagaacttcaacaacggcgcggccgtccagaagctcagcgacgtcccggccgactacgacatcatcgctgtctccttcgcggacgccacggcgacccagggcgcggtcaccttcaacctggacaccgccgggctgaacggctacaccgacgcccagttccgctcggacatcaaggccaagcaggcggccggcaagaacgtcatcatctcgatcggcggcgagctgggcacggtccgcgtcgacagcgacgcctccgccaccgcgttctccaactcggtgtacgcgctgatgcaggactacggcttcaacggggtcgacatcgacctggagaacggtctcaactccacctacatgacgaaggcactgcgccagctgtcggcgaaggcgggcagcgggctggtcatcacgatggccccgcagaccatcgacatgcagtcgacgtcgggcgaatacttcaagacggcgctcaacgtcaaggacatcctgaccgtcgtcaacatgcagtactacaacagcggttcgatgctcggctgcgacggcaaggtctactcgcagggctcggtggacttcctcaccgcgctcgcctgcatccagctggagggcggcctcgacccgtcccaggtcggcatcggcgtccccgcctccacccgcggcgcgggcagcggctacgtctccccgtccatcgtgaacgcggcgctggactgcctcgccaagggcaccaactgcggctcgttcaagccgtccaagacctacccgtcgctgcgcggcgcgatgacctggtcgacgaactgggacgctacggccgggttcgcctggtcgaaggcggtcggcccgcacgtccgcagcctcccgtaacgacaccgcaccaccccggaacctgcagcgccgccgctcccccggcggcgctgcggcgttacgccgacgacgaccgggtcaccagggcagttcgcgcacctgctggacgcacagcacgatgaacagcagaccggacagggcgagcatcccgttgctgacccatccgttgcgccattcccccggcgtgcgggaggagttgagcagccagagcagggtcagggcgaggaacggcatgaagaacgcgccgagcaccccgtaggcgatgaccaggccgaagggctcgtccagccagagcagggtcatcggcgggaaggtcagccacaggaggtacgcgcggaacggcagcgaccgctgccggcgctcggcgacgtccggcccctcgtgctcctggcgctcctcggtcttcgccgctccggccgccggagcccggaaccgctccacgaagtcggcgaacatcaggctgaccccgtgccagacgccgatcagcgacgagaacgacg

SEQ ID NO: 177 - DNA, 2041 bp, Parengyodontium album
  source 1..2041: mol_type = genomic DNA
ttccccccctcggccctttacggccacgacctccgtaataacgctgatgccatctatgaccttgcggtccaccatgtctgaacaccatggccgaatgcggatactacgttacgcttttgagcaacatcgcctgtcccgttcgcagtggtgtgacgccggtcttagttgttgctcacacatgatttcgcaggttctactagttcaagtctgtgtattactggttgagtgagctggaaagctggatcatcgggggccacatgcccatgttgcccggatggatgctacgcttctttacaggtactgtcaatgtgactgccaggaacgaagccgacatatataaagcaaccggcagctcttcttcggctgctggattgtacttgcacaagggtctcctgcttgaggttgctttttgcgattcaaaaagaacttgtgtcttttctgcctccaggtggaaaaccaacagacccctctacactttatactcgccacacatttacaccatgtcacgcctcctcgaagccagcctcgtgctgctcccgctcctctcgacactcgccggagcagctcccgcaacggtttctgcgcgggcagagacatgcgcactcaagggcaaaccctcgggcaaagtcctccagggatactgggagaactgggacggtgcgaaaaacggcgtccacccgccctttggttggacaccgatccagaacccccagattctccagcacggctacaacgtcatccaggcggcgtttcccatcatcatgcccgacggcacggccaagtgggaagacggcatggaccgagacgtcaaggtggcgtcgccgacggaaatgtgcgaggctaaagcgaatggagctacgattctcatgtcaattggtggcgcgacggcggctattaaccttggctcgtcggccgtggcagacaagttcatctcgacgattgtgccgattttgaaaaagtacaactttgacggtattgatatcgacattgagtctggtctgacgggtagcggcaacattaaccagctgtcgacgtcgcagagcaacctcatccgtatcatcgatgggattctggcgcagatgccggccaactttggtctgaccatggcgccggaaacggcatacgtgactggcggcagcgtgacgtatggctccatctggggcgcatacctgcctattatcaaaaagtatgccgacaatgggcgactgtggtggctcaacatgcagtactacaatggtgaaatgtacggctgcaaaggcgactcgtacaaggctggaacggtggagggcttcattgcgcagacggactgcttggacaagggccttgttgtgcagggcacgactatccgcgtgccgtatgataagcaggttcctgggctgccggctcagcagggtgcgggaggcggatacatggctcccagcttggttgcgcaggcctggaatcactacggtggcaagctcaaggggttgatgacttggtctattaactgggatggatccaagggatggacgtttggtgataatgtcaaggggttgttttaaagaagaaatgtaaatatgtgggagtggtgtaataaccaggtgtcgtcctgtacatatcatgttcagattggaagctcgggattggccacggcttttgtaaatatcaagaatgaattaccgaggaaacatgaacggcaatgctgttgttttgtagtgatttacataaatcgtggaagagggggggttatgttgtattgggttggagattgggtggcatacatatgcaagtcatgccaagttgaagagacaagtcgccgtgaagaaagaatctcttatgcacgtgctttgaacatggagacgcatgcactataatagcgtgaagagtccttgttctaaagtcgcatgagttctccatagccaaggttgcgatgaagaagcgggtgcgtggagtgctgaatctgggattccctggccatggcatgccttgttggtgcggactggattgtgcctccgctgcaaacaaccgtctcggtgactggaatgcttgaaagttctatagg

SEQ ID NO: 178 - DNA, 11704 bp, Aspergillus tubingensis
  source 1..11704: mol_type = genomic DNA
atgaagtactctactatcttcagcgctgctgccgctgttttcgctggttccgccgctgccgtcggcgtgtccggctctgctgaaggtttcgccaagggcgtcaccggtggtggcagtgccacccccgtctaccccgacactatcgatgagctggtctcctaccttggtgatgatgaggcccgcgtcattgtcctgaccaagaccttcgacttcaccgacagcgaaggtaccaccactggcactggttgcgctccctggggtaccgcttccgcttgccaggttgctattgaccaggacgactggtgcgagaactacgagcccgatgctccctctgtcagcgttgaatactacaatgctggtaccctcggtatcactgtcacctccaacaagtccctcatcggtgagggctcctctggtgccattaagggcaagggtctccgcattgtcagcggtgccgagaacatcatcatccagaacatcgccgttaccgacatcaacgccaagtacgtctggggtggtgatgctattactcttgatgactgcgacctggtctggatcgaccacgttactaccgcccgcattggtcgccagcactacgtcctcggaaccagcgccgacaaccgcgtctctctcaccaacaactacattgacggtgtctccgactactccgccacctgcgatggctaccactactgggccatctacctcgacggtgatgccgacttggtcaccatgaagggcaactacatctaccacacctccggccgttcccccaaggtccaggacaacactctcctccacgctgtcaacaactactggtacgacatctccggccacgccttcgagatcggtgagggtggctacgtcttggctgagggcaacgttttccagaacgttgacactgttcttgagacctatgagggcgaggccttcaccgtcccctccaccaccgccggtgaagtctgctccacctaccttggccgtgactgtgtcatcaacggcttcggctcctccggcactttctccgaggacagcacctctttcctctccgacttcgagggcaagaacattgcctctgcttcggcttacacctctgttgcctctagcgttgttgccaacgccggtcagggcaacctgtaagcgatcgcataataaataacggattgtgtccgtaatcacacgtggtgcgtacgataacgcatagtgtttttccctccacttaaatcgaagggttgtgtcttggatcgcgcgggtcaaatgtatatggttcatatacatccgcaggcacgtaataaagcgaggggttcgaatccccccgttacccccggtaggggcccagatccgggtgactgacacctggcggtagacaatcaatccatttcgctatagttaaaggatggggatgagggcaattggttatatgatcatgtatgtagtgggtgtgcataatagtagtgaaatggaagccaagtcatgtgattgtaatcgaccgacggaattgaggatatccggaaatacagacaccgtgaaagccatggtctttccttcgtgtagaagaccagacagacagtccctgatttacccttgcacaaagcactagaaaattagcattccatccttctctgcttgctctgctgatatcactgtcattcaatgcatagccatgagctcatcttagatccaagcacgtaattccatagccgaggtccacagtggagcagcaacattccccatcattgctttccccaggggcctcccaacgactaaatcaagagtatatctctaccgtccaatagatcgtcttcgcttcaaaatctttgacaattccaagagggtccccatccatcaaacccagttcaataatagccgagatgcatggtggagtcaattaggcagtattgctggaatgtcggggccagttggcccggtggtcattggccgcctgtgatgccatctgccactaaatccgatcattgatccaccgcccacgaggcgcgtctttgctttttgcgcggcgtccaggttcaactctctccactagtggaccagacaggcgccactcggccgggccacagctgcttgggtgttgaccgggagcggaccaattaaggactcgaacgaccgcggggttcaaatgcaaacaagtacaacacgcagcaaacgaagcagcccaccactgcgttgatgcccagtttgactgtccgaaatccaccggaaaggtggaaacatactatgtaacaatcagagggaagaaaaaatttttatcgacgaggcaggatagtgactgatggtggggtcatggtcgggtctccgagcgaaagagaaccaaggaaacaagatcaacgaggttggtgtacccaaaaggccgcagcaacaagagtcatcgcccaaaagtcaacagtctggaagagactccgccgtgcagattctgcgtcggtcccgcacatgcgtggtgggggcattacccctccatgtccaatgataagggcggcggtcgagggcttaagcccgcccactaattcgccttctcgcttgcccctccatataaggattccccctccttcccctcccacaacttttttccttctttctctcttcgtccgcatcagtacgtatatctttcccccatacctcctttcctactcttcttccattcattcaactcttctccttactgacatctgttttgctcagtacctctacgcgatcagccgtagtatctgagcaagcttctctacagaatctttctagtatcttacaaagaactacaaagttcgcaccaggtaccacagaatgcctcaatcctgggaagaactggccgctgataagcgcgcccgcctcgcaaaaaccatccctgatgaatggaaagtccagacgctgcctgcggaagacagcgttattgatttcccaaagaaatcgggtatcctttcagaggccgaactgaagatcacagaggcctccgctgcagatcttgtgtccaagctggcggccggagagttgacctcggtggaagttacgctagcattctgtaaacgggcagcaatcgcccagcagttagtagggtcccctctacctctcagggagatgtaacaacgccaccttatgggactatcaagctgacgctggcttctgtgcagacaaactgcgcccacgagttcttccctgacgccgctctcgcgcaggcaagggaactcgatgaatactacgcaaagcacaagagacccgttggtccactccatggcctccccatctctctcaaagaccagcttcgagtcaaggtacaccgttgcccctaagtcgttagatgtccctttttgtcagctaacatatgccaccagggctacgaaacatcaatgggctacatctcatggctaaacaagtacgacgaaggggactcggttctgacaaccatgctccgcaaagccggtgccgtcttctacgtcaagacctctgtcccgcagaccctgatggtctgcgagacagtcaacaacatcatcgggcgcaccgtcaacccacgcaacaagaactggtcgtgcggcggcagttctggtggtgagggtgcgatcgttgggattcgtggtggcgtcatcggtgtaggaacggatatcggtggctcgattcgagtgccggccgcgttcaacttcctgtacggtctaaggccgagtcatgggcggctgccgtatgcaaagatggcgaacagcatggagggtcaggagacggtgcacagcgttgtcgggccgattacgcactctgttgagggtgagtccttcgcctcttccttcttttcctgctctataccaggcctccactgtcctcctttcttgctttttatactatatacgagaccggcagtcactgatgaagtatgttagacctccgcctcttcaccaaatccgtcctcggtcaggagccatggaaatacgactccaaggtcatccccatgccctggcgccagtccgagtcggacattattgcctccaagatcaagaacggcgggctcaatatcggctactacaacttcgacggcaatgtccttccacaccctcctatcctgcgcggcgtggaaaccaccgtcgccgcactcgccaaagccggtcacaccgtgaccccgtggacgccatacaagcacgatttcggccacgatctcatctcccatatctacgcggctgacggcagcgccgacgtaatgcgcgatatcagtgcatccggcgagccggcgattccaaatatcaaagacctactgaacccgaacatcaaagctgttaacatgaacgagctctgggacacgcatctccagaagtggaattaccagatggagtaccttgagaaatggcgggaggctgaagaaaaggccgggaaggaactggacgccatcatcgcgccgattacgcctaccgctgcggtacggcatgaccagttccggtactatgggtatgcctctgtgatcaacctgctggatttcacgagcgtggttgttccggttacctttgcggataagaacatcgataagaagaatgagagtttcaaggcggttagtgagcttgatgccctcgtgcaggaagagtatgatccggaggcgtaccatggggcaccggttgcagtgcaggttatcggacggagactcagtgaagagaggacgttggcgattgcagaggaagtggggaagttgctgggaaatgtggtgactccatagctcgagatctagagggtgactgacacctggcggtagacaatcaatccatttcgctatagttaaaggatggggatgagggcaattggttatatgatcatgtatgtagtgggtgtgcataatagtagtgaaatggaagccaagtcatgtgattgtaatcgaccgacggaattgaggatatccggaaatacagacaccgtgaaagccatggtctttccttcgtgtagaagaccagacagacagtccctgatttaccctgcacaaagcactagaaaattagcattccatccttctctgcttgctctgctgatatcactgtcattcaatgcatagccatgagctcatcttagatccaagcacgtaattccatagccgaggtccacagtggagcagcaacattccccatcattgctttccccaggggcctcccaacgactaaatcaagagtatatctctaccgtccaatagatcgtcttcgcttcaaaatctttgacaattccaagagggtccccatccatcaaacccagttcaataatagccgagatgcatggtggagtcaattaggcagtattgctggaatgtcggggccagttggccgggtggtcattggccgcctgtgatgccatctgccactaaatccgatcattgatccaccgcccacgaggcgcgtctttgctttttgcgcggcgtccaggttcaactctctccttgaagttcctattccgagttcctattcttcaaatagtataggaacttcacctagcaaagtattttcggtacgattttgacatttgctccattgtcgaggatggatggaacgagcggcgtgcgccacgaaagtgaggctattgcctatcagctctttgctacattccggaaacaaacatccctttttgtgaattatctacgcaacttagatggcgtgaacgcatcttcaaagtctttcggcaggtccggcacgacttttgcatccagagaagcgcctacatgtgtattcgaccacctcctagcgcgcttggatatgaggaaatattactgagagtcgaaaacaagctccaccgcaccagctcttcttggagttttatattaaagaatattcccagctcgttgtattattctttttctaccgtgctaatgtatcaaggactttggtacctattaacgttattattcgtgtgctattcccaaacataaccctgtatatgtttcgaacgccgttatgacccatgtcttacatactcattaagtcattcccttggataatctcgactcagatgcggcggttgatgtaggaggagaggtaatcgaggacctcctgggagatgatgccgttccaggcggggtagcggatggagccctcggcggagcccttgagctgctcgatatgctgccactcctcgatggggttggtctcatccttgagggcgatcatctccttggagatgggatcgtaggcgtagtagcgggagactagtgcgaagtaatgatcggggatggcggtgatctgatgggtgtaggtggtgcgggcgacggcggaggcgcgcttatcggaccagttgccgacgacgttggtgagctcggtgaggcccttcatggagaggaaggaggtcatgagatggcggccgatatgggacttggggccgttcttgatggcgaagatggagtagggggcgttcttcttgagggccttgttgtaggagcggacgaggttatccttgaggagctggtactcctgcttgttggaggaggagttgccggtgcggttgacgcgcttgaggacgggctcggagttgcggaggaactcatcgaggtagacgaggggatcgatgcggccgcgggcggagaagaagtagatatggcgggagacggaggtcttggtctcggtgacgaggcactggatgatgacgccgaggtacttgttctggacgagcttgaaggacttgggatcgacgttcttgatatcggagaagcggccgcagttgatgaaggtggcgaggaagaggaactggtagagggtcttggtcttggtgaagcgggaggtgtactcgaaggagttgaggatcttctcggtgatctcccagatggactcgccctcggagaggagggccttgagcatcttcttggaatgggagttgcccttatcggcctcctcggaggactcgaactggagctggagggaggagacgatatcggtgatatcggactgatgcttctggccgtagtaggggatgatggtgaactcccaggcggggatgagcttcttgagggaggcctccaggatggtggccttctgggtcttgtacttgaactggagggacttgttgacgatatcgaaggagagggagttggagatgatggtgttgtaggacatgaaggtggcgcgcttgatggcggtgccgttatgggtgatcatccagcagaggtaggtgagctcggcggcgcagagggcgatcttctcgccggaggggcgctcgaagcgctcgacgaactggcggacgaggaccttggggggggtcttgcagaggatatcgaactggggcatggtggatcgatccttatgttttgacaaagcgacagaacagcgtcccaagcacagcttgactatccagagaacgctgtccctgacgacgattcttaaatatttgcgttcagcatgactccagagccttgagcaccttgcacggcagatcaacccacgaactacccttctaatcccgtatgatgcttgatggatgccaaatggagccggcaattaatccatctgccaggaacgggggtatacaacatctctcattggccgaaactccgatcagttcgggggccaggatttaaccctggtcccctttaattgttgcagaacaacaaatctccgacacgggactactgactgttaactgaatacgcctgatagtgggggtaagaaacaacgcccgaaccttgttatgactcgtggaggacgcgacggattgctcggggggtggtgagccggggttaacagggtaagctgcaggctgcccgttagggcgcctcgcttggcgaagcgagatgaaatcctgcagactacaccggttgacaccatacgaccctatgggtgtggagaggataaattaaacttatatctacgaaaagttaaagcccgtcccatgttgcacttcagctgcaaggtgatggagcgttcagcgggatatcctggctagtggcttgagcgcacccatagtctaatagggcttttaagccgagagggttctaaatagccgacaattctccctggaatgtgaatatcacatgcattcagctcaggacatcgtctgctgctccagtcatcattccgaccgaaggacgacccgcggacgggatcttggacgcattccacgctgctcgggaggccgccagagatgcccgccactcggctattaggctgatacatgcgtgctttcatttattaatcaaagagaattgtcatattgcaagttaattaatgcatgcaagcttggcctccgcggcctgcggccgcagcttggcgtaatcatggtcatagctgtttcctgtgtgaaattgttatccgctcacaattccacacaacatacgagccggaagcataaagtgtaaagcctggggtgcctaatgagtgagctaactcacattaattgcgttgcgctcactgcccgctttccagtcgggaaacctgtcgtgccagctgcattaatgaatcggccaacgcgcggggagaggcggtttgcgtattgggcgctcttccgcttcctcgctcactgactcgctgcgctcggtcgttcggctgcggcgagcggtatcagctcactcaaaggcggtaatacggttatccacagaatcaggggataacgcaggaaagaacatgtgagcaaaaggccagcaaaaggccaggaaccgtaaaaaggccgcgttgctggcgtttttccataggctccgcccccctgacgagcatcacaaaaatcgacgctcaagtcagaggtggcgaaacccgacaggactataaagataccaggcgtttccccctggaagctccctcgtgcgctctcctgttccgaccctgccgcttaccggatacctgtccgcctttctcccttcgggaagcgtggcgctttctcatagctcacgctgtaggtatctcagttcggtgtaggtcgttcgctccaagctgggctgtgtgcacgaaccccccgttcagcccgaccgctgcgccttatccggtaactatcgtcttgagtccaacccggtaagacacgacttatcgccactggcagcagccactggtaacaggattagcagagcgaggtatgtaggcggtgctacagagttcttgaagtggtggcctaactacggctacactagaaggacagtatttggtatctgcgctctgctgaagccagttaccttcggaaaaagagttggtagctcttgatccggcaaacaaaccaccgctggtagcggtggtttttttgtttgcaagcagcagattacgcgcagaaaaaaaggatctcaagaagatcctttgatcttttctacggggtctgacgctcagtggaacgaaaactcacgttaagggattttggtcatgagattatcaaaaaggatcttcacctagatccttttaaattaaaaatgaagttttaaatcaatctaaagtatatatgagtaaacttggtctgacagttaccaatgcttaatcagtgaggcacctatctcagcgatctgtctatttcgttcatccatagttgcctgactccccgtcgtgtagataactacgatacgggagggcttaccatctggccccagtgctgcaatgataccgcgagacccacgctcaccggctccagatttatcagcaataaaccagccagccggaagggccgagcgcagaagtggtcctgcaactttatccgcctccatccagtctattaattgttgccgggaagctagagtaagtagttcgccagttaatagtttgcgcaacgttgttgccattgctacaggcatcgtggtgtcacgctcgtcgtttggtatggcttcattcagctccggttcccaacgatcaaggcgagttacatgatcccccatgttgtgcaaaaaagcggttagctccttcggtcctccgatcgttgtcagaagtaagttggccgcagtgttatcactcatggttatggcagcactgcataattctcttactgtcatgccatccgtaagatgcttttctgtgactggtgagtactcaaccaagtcattctgagaatagtgtatgcggcgaccgagttgctcttgcccggcgtcaatacgggataataccgcgccacatagcagaactttaaaagtgctcatcattggaaaacgttcttcggggcgaaaactctcaaggatcttaccgctgttgagatccagttcgatgtaacccactcgtgcacccaactgatcttcagcatcttttactttcaccagcgtttctgggtgagcaaaaacaggaaggcaaaatgccgcaaaaaagggaataagggcgacacggaaatgttgaatactcatactcttcctttttcaatattattgaagcatttatcagggttattgtctcatgagcggatacatatttgaatgtatttagaaaaataaacaaataggggttccgcgcacatttccccgaaaagtgccacctgacgtctaagaaaccattattatcatgacattaacctataaaaataggcgtatcacgaggccctttcgtctcgcgcgtttcggtgatgacggtgaaaacctctgacacatgcagctcccggagacggtcacagcttgtctgtaagcggatgccgggagcagacaagcccgtcagggcgcgtcagcgggtgttggcgggtgtcggggctggcttaactatgcggcatcagagcagattgtactgagagtgcaccatatgcggtgtgaaataccgcacagatgcgtaaggagaaaataccgcatcaggcgccattcgccattcaggctgcgcaactgttgggaagggcgatcggtgcgggcctcttcgctattacgccagctggcgaaagggggatgtgctgcaaggcgattaagttgggtaacgccagggttttcccagtcacgacgttgtaaaacgacggccagtgaattggcctccatggccgcggccgcgaattcatcttgaagttcctattccgagttcctattctctagaaagtataggaacttcgctagcccgttaaattgccgtcgtcagccgttaaattaccgattaatcccgataaatttccgagatctccgttaaattgccgttcgcagccgttaaattaccggggacgaccgataaatttccgcgatgaattcatggtgttttgatcattttaaatttttatatggcgggtggtgggcaactcgcttgcgcgggcaactcgcttaccgattacgttagggctgatatttacgtaaaaatcgtcaagggatgcaagaccaaaccgttaaatttccggagtcaacagcatccaagcccaagtccttcacggagaaaccccagcgtccacatcacgagcgaaggaccacctctaggcatcggacgcaccatccaattagaagcagcaaagcgaaacagcccaagaaaaaggtcggcccgtcggccttttctgcaacgctgatcacgggcagcgatccaaccaacaccctccagagtgactaggggcggaaatttatcgggattaatttccactcaaccacaaatcacagtcgtccccggtaatttaacggctgcagacggcaatttaacggcttctgcgaatcgcttggattccccgcccctggccgtagagcttaaagtatgtcccttgtcgatgcgatgtatcacaacatataaatactggcaagggatgccatgcttggagcaacaatctcagaacaccaatatcaattcatctcgagtctgaactcagacaacacaaattcttcaaaattgaggatttagtcttgatcggatccttcacc

SEQ ID NO: 179 - DNA, 8831 bp, Aspergillus fumigatus
  source 1..8831: mol_type = genomic DNA
atgagattcggttggctcgaggtggccgctctgacggccgcttctgtagccaatgcccaggtttgtgatgctttcccgtcattgtttcggatatagttgacaatagtcatggaaataatcaggaattggctttctctccaccattctacccttcgccttgggctgatggccagggagagtgggcagatgcccatcgacgcgccgtcgagatcgtttctcagatgacactggcggagaaggttaaccttacaacgggtactgggtgggttgcgacttttttgttgacagtgagctttcttcactgaccatctacacagatgggaaatggaccgatgcgtcggtcaaaccggcagcgttcccaggtaagcttgcaattctgcaacaacgtgcaagtgtagttgctaaaacgcggtggtgcagacttggtatcaactggggtctttgtggccaggattcccctttgggtatccgtgactgtgagctatacccgcggagtctttcagtccttgtattatgtgctgatgattgtctctgtatagctgacctcaactccgccttccctgctggtactaatgtcgccgcgacatgggacaagacactcgcctaccttcgtggcaaggccatgggtgaggaattcaacgacaagggcgtggacattttgctggggcctgctgctggtcctctcggcaaatacccggacggcggcagaatctgggaaggcttctctcctgatccggttctcactggtgtacttttcgccgaaactatcaagggtatccaagacgcgggtgtgattgctactgccaagcattacattctgaatgaacaggagcatttccgacaggttggcgaggcccagggatatggttacaacatcacggagacgatcagctccaacgtggatgacaagaccatgcacgagttgtacctttggtgagtagttgacactgcaaatgaggaccttgattgatttgactgacctggaatgcaggccctttgcagatgctgtgcgcggtaagattttccgtagacttgacctcgcgacgaagaaatcgctgacgaaccatcgtagctggcgttggcgctgtcatgtgttcctacaatcaaatcaacaacagctacggttgtcaaaacagtcaaactctcaacaagctcctcaaggctgagctgggcttccaaggcttcgtcatgagtgactggggcgctcaccacagcggtgtcggcgctgccctcgctgggttggatatgtcgatgcctggagacatttccttcgacgacggactctccttctggggcacgaacctaactgtcagtgttcttaacggcaccgttccagcctggcgtgtcgatgacatggctgttcgtatcatgaccgcgtactacaaggttggtcgtgaccgtcttcgtattccccctaacttcagctcctggacccgggatgagtacggctgggagcattctgctgtctccgagggagcctggaccaaggtgaacgacttcgtcaatgtgcagcgcagtcactctcagatcatccgtgagattggtgccgctagtacagtgctcttgaagaacacgggtgctcttcctttgaccggcaaggaggttaaagtgggtgttctcggtgaagacgctggttccaacccgtggggtgctaacggctgccccgaccgcggctgtgataacggcactcttgctatggcctggggtagtggtactgccgagttcccttaccttgtcacccccgagcaggctatccagcgagaggtcatcagcaacggcggcaatgtctttgctgtgactgataacggggctctcagccagatggcagatgttgcatctcaatccaggtgagtgcgggctcttagaaaaagaacgttctctgaatgaagttttttaaccattgcgaacagcgtgtctttggtgtttgtcaacgccgactctggagagggttacatcagtgtcgacggcaacgagggtgaccgcaaaaatctcactctgtggaagaacggcgaggccgtcattgacactgttgtcagccactgcaacaacacgattgtggttattcacagtgttgggcccgtcttgatcgaccggtggtatgataaccccaacgtcactgccatcatctgggccggcttgcccggtcaggagagtggcaactccctggtcgacgtgctctatggccgcgtcaaccccagcgccaagaccccgttcacctggggcaagactcgggagtcttacggggctcccttgctcaccgagcctaacaatggcaatggtgctccccaggatgatttcaacgagggcgtcttcattgactaccgtcactttgacaagcgcaatgagacccccatttatgagtttggccatggcttgagctacaccacctttggttactctcaccttcgggttcaggccctcaatagttcgagttcggcatatgtcccgactagcggagagaccaagcctgcgccaacctatggtgagatcggtagtgccgccgactacctgtatcccgagggtctcaaaagaattaccaagtttatttacccttggctcaactcgaccgacctcgaggattcttctgacgacccgaactacggctgggaggactcggagtacattcccgaaggcgctagggatgggtctcctcaacccctcctgaaggctggcggcgctcctggtggtaaccctaccctttatcaggatcttgttagggtgtcggccaccataaccaacactggtaacgtcgccggttatgaagtccctcaattggtgagtgacccgcatgttccttgcgttgcaatttggctaactcgcttctagtatgtttcactgggcggaccgaacgagcctcgggtcgttctgcgcaagttcgaccgaatcttcctggctcctggggagcaaaaggtttggaccacgactcttaaccgtcgtgatctcgccaattgggatgtggaggctcaggactgggtcatcacaaagtaccccaagaaagtgcacgtcggcagctcctcgcgtaagctgcctctgagagcgcctctgccccgtgtctactagtaactagaggtgactgacacctggcggtagacaatcaatccatttcgctatagttaaaggatggggatgagggcaattggttatatgatcatgtatgtagtgggtgtgcataatagtagtgaaatggaagccaagtcatgtgattgtaatcgaccgacggaattgaggatatccggaaatacagacaccgtgaaagccatgctctttccttcgtgtagaagaccagacagacagtccctgatttacccttgcacaaagcactagaaaattagcattccatccttctctgcttgctctgctgatatcactgtcattcaatgcatctagattaccgttacacatttccactcacactcaaagtccaactcttttctcgtaagctttccagccttcctcccggtaccgggaggaaggctggaaagcttacgagaaaagagttggactttgagtgtgagtggaaatgtgtaacggtattgactaaaagggatcccttttagtcaataccgttacacatttccactcacactcaaagtccaactcttttctcgtaagctttccagccttcctcccggtacctctgaaccgcctcgactggatcgtccgccttatagatgcccctacccgcaatgataaagtccgcacctcgcccaaccgccgacccaggtgtctgatactgctgccccagcttatcccccttatccgacagattcaccccagtcgtaaagacgacaaaatcctcgctctcctctttctgttcgggcagcacctcactcaacgcccttgtactcacgaatcccatcacaaaccccttatacttccgcgcgtactcaaccgagcgtgcctgtgactcccctgtcgcaagagatcccttactcgtcatctcggcaagaatcaggagacctcgttgattcgcgtctttaaagtcaggagacttggttgtctgtgcgagggcctcgacgatcccttcgcccggcaggatggcgcagttgatgatgtgtgcccattcggagatgcggagagcgccaccgtggtactgcttttgcacggtgttgccgatgtcgatgaacttgcggtcctcaaagatgaggaagttgtgctttgtcgcgagggattggagcgaggaaagggtcgacggggtgagatcggtgaggatgtcgatgtgggttttcagaactgcgatataggggcctaggcctgtactcactacgcatcagctatttgttatcctggaggggcattggtgcaggatgtacggtcagcaagatcgaggagctcggcggaagtagtaacgtctgcggagacggtgacgttggttttcttctcctcggcgatggagaagagtttagatgttaaagggttgggatggttggttgcgcgaattgcgtaggggaggtgggacttcgaagacatgatggcggttctccaatgattgaattgggctggattaaactgacaatttgaagctggaagtgggatggctgtataacgaaaactcaccccgctgcggtggaatttttgctccggcccgataagataggcgcagacctatctccactatcacgaatataggtcacgaacccgactatcattcaaacagaccacattttatcaactctcccctctgtgctaagatgtcgactacatttacatcaaatcctttgcaacaccaaatgcgctcaatccccaaagacccgcttgcgcaagcaagtacagcgaaccattgtacctgccggtgccgttcggcttgtcgctataaatatagcccagcatgtagagggtgcggagaacaacccaggccgctcctaagcccgctgctgcctctgggtacttgacgcctgccaccaggatagagagcattgtctgcggcgcgttctcgaggaagttgccgtgggcgcgttgtgcgcagttgaatttgtaggctttgggctgttcacaaacgtcatttagtatctaggatgcatcctagagtttaaacagcttggcactggccgtcgttttacaacgtcgtgactgggaaaaccctggcgttacccaacttaatcgccttgcagcacatccccctttcgccagctggcgtaatagcgaagaggcccgcaccgatcgcccttcccaacagttgcgcagcctgaacggcgaatggcgcctgatgcggtattttctccttacgcatctgtgcggtatttcacaccgcatatggtgcactctcagtacaatctgctctgatgccgcatagttaagccagccccgacacccgccaacacccgctgacgcgccctgacgggcttgtctgctcccggcatccgcttacagacaagctgtgaccgtctccgggagctgcatgtgtcagaggttttcaccgtcatcaccgaaacgcgcgagacgaaagggcctcgtgatacgcctatttttataggttaatgtcatgataataatggtttcttagacgtcaggtggcacttttcggggaaatgtgcgcggaacccctatttgtttatttttctaaatacattcaaatatgtatccgctcatgagacaataaccctgataaatgcttcaataatattgaaaaaggaagagtatgagtattcaacatttccgtgtcgcccttattcccttttttgcggcattttgccttcctgtttttgctcacccagaaacgctggtgaaagtaaaagatgctgaagatcagttgggtgcacgagtgggttacatcgaactggatctcaacagcggtaagatccttgagagttttcgccccgaagaacgttttccaatgatgagcacttttaaagttctgctatgtggcgcggtattatcccgtattgacgccgggcaagagcaactcggtcgccgcatacactattctcagaatgacttggttgagtactcaccagtcacagaaaagcatcttacggatggcatgacagtaagagaattatgcagtgctgccataaccatgagtgataacactgcggccaacttacttctgacaacgatcggaggaccgaaggagctaaccgcttttttgcacaacatgggggatcatgtaactcgccttgatcgttgggaaccggagctgaatgaagccataccaaacgacgagcgtgacaccacgatgcctgtagcaatggcaacaacgttgcgcaaactattaactggcgaactacttactctagcttcccggcaacaattaatagactggatggaggcggataaagttgcaggaccacttctgcgctcggcccttccggctggctggtttattgctgataaatctggagccggtgagcgtgggtctcgcggtatcattgcagcactggggccagatggtaagccctcccgtatcgtagttatctacacgacggggagtcaggcaactatggatgaacgaaatagacagatcgctgagataggtgcctcactgattaagcattggtaactgtcagaccaagtttactcatatatactttagattgatttaaaacttcatttttaatttaaaaggatctaggtgaagatcctttttgataatctcatgaccaaaatcccttaacgtgagttttcgttccactgagcgtcagaccccgtagaaaagatcaaaggatcttcttgagatcctttttttctgcgcgtaatctgctgcttgcaaacaaaaaaaccaccgctaccagcggtggtttgtttgccggatcaagagctaccaactctttttccgaaggtaactggcttcagcagagcgcagataccaaatactgttcttctagtgtagccgtagttaggccaccacttcaagaactctgtagcaccgcctacatacctcgctctgctaatcctgttaccagtggctgctgccagtggcgataagtcgtgtcttaccgggttggactcaagacgatagttaccggataaggcgcagcggtcgggctgaacggggggttcgtgcacacagcccagcttggagcgaacgacctacaccgaactgagatacctacagcgtgagctatgagaaagcgccacgcttcccgaagggagaaaggcggacaggtatccggtaagcggcagggtcggaacaggagagcgcacgagggagcttccagggggaaacgcctggtatctttatagtcctgtcgggtttcgccacctctgacttgagcgtcgatttttgtgatgctcgtcaggggggcggagcctatggaaaaacgccagcaacgcggcctttttacggttcctggccttttgctggccttttgctcacatgttctttcctgcgttatcccctgattctgtggataaccgtattaccgcctttgagtgagctgataccgctcgccgcagccgaacgaccgagcgcagcgagtcagtgagcgaggaagcggaagagcgcccaatacgcaaaccgcctctccccgcgcgttggccgattcattaatgcagctggcacgacaggtttcccgactggaaagcgggcagtgagcgcaacgcaattaatgtgagttagctcactcattaggcaccccaggctttacactttatgcttccggctcgtatgttgtgtggaattgtgagcggataacaatttcacacaggaaacagctatgaccatgattacgaattgtttaaacgtcgacgcattccgaatacgaggcctgattaatgattacatacgcctccgggtagtagaccgagcagccgagccagctcagcgcctaaaacgccttatacaattaagcagttaaagaagttagaatctacgcttaaaaagctacttaaaaatcgatctcgcagtcccgattcgcctatcaaaaccagtttaaatcaactgattaaaggtgccgaacgagctataaatgatataacaatattaaagcattaattagagcaatatcaggccgcgcacgaaaggcaacttaaaaagcgaaagcgctctactaaacagattacttttgaaaaaggcacatcagtatttaaagcccgaatccttattaagcgccgaaatcaggcagataaagccatacaggcagatagacctctacctattaaatcggcttctaggcgcgctccatctaaatgttctggctgtggtgtacaggggcataaaattacgcactacccgaatcgatagaactactcatttttatatagaagtcagaattcatggtgttttgatcattttaaatttttatatggcgggtggtgggcaactcgcttgcgcgggcaactcgcttaccgattacgttagggctgatatttacgtaaaaatcgtcaagggatgcaagaccaaagtactaaaaccccggagtcaacagcatccaagcccaagtccttcacggagaaaccccagcgtccacatcacgagcgaaggaccacctctaggcatcggacgcaccatccaattagaagcagcaaagcgaaacagcccaagaaaaaggtcggcccgtcggccttttctgcaacgctgatcacgggcagcgatccaaccaacaccctccagagtgactaggggcggaaatttatcgggattaatttccactcaaccacaaatcacagtcgtccccggtattgtcctgcagaatgcaatttaaactcttctgcgaatcgcttggattccccgcccctggccgtagagcttaaagtatgtcccttgtcgatgcgatgtatcacaacatataaatactggcaagggatgccatgcttggagtttccaactcaatttacctctatccacacttctcttccttcctcaatcctctatatacacaactggatttacc

SEQ ID NO: 180 - DNA, 2388 bp, unidentified
  source 1..2388: mol_type = unassigned DNA
atgatgactcctactgctattttaactgctgttgctgctttattacctactgctacttgggctcaagataatcaaacttatgctaattattcttctcaatctcaacctgatttatttcctcgtactgttgctactattgatttatcttttcctgattgtgaaaatggtcctttatctactaatttagtttgtaataaatctgctgatccttgggctcgtgctgaagctttaatttctttatttactttagaagaattaattaataatactcaaaatactgctcctggtgttcctcgtttaggtttacctcaatatcaagtttggaatgaagctttacatggtttagatcgtgctaatttttctcattctggtgaatattcttgggctacttcttttcctatgcctattttatctatggcttcttttaatcgtactttaattaatcaaattgcttctattattgctactcaagctcgtgcttttaataatgctggtcgttatggtttagattcttatgctcctaatattaatggttttcgttctcctttatggggtcgtggtcaagaaactcctggtgaagatgctttttttttatcttctacttatgcttatgaatatattactggtttacaaggtggtgttgatcctgaacatgttaaaattgttgctactgctaaacattttgctggttatgatttagaaaattggggtaatgtttctcgtttaggttttaatgctattattactcaacaagatttatctgaatattatactcctcaatttttagcttctgctcgttatgctaaaactcgttctattatgtgttcttataatgctgttaatggtgttccttcttgtgctaattctttttttttacaaactttattacgtgaaaattttgattttgttgatgatggttatgtttcttctgattgtgatgctgtttataatgtttttaatcctcatggttatgctttaaatcaatctggtgctgctgctgattctttattagctggtactgatattgattgtggtcaaactttaccttggcatttaaatgaatcttttgttgaaggttatgtttctcgtggtgatattgaaaaatctttaactcgtttatattctaatttagttcgtttaggttattttgatggtaataattctgaatatcgtaatttaaattggaatgatgttgttactactgatgcttggaatatttcttatgaagctgctgttgaaggtattactttattaaaaaatgatggtactttacctttatctaaaaaagttcgttctattgctttaattggtccttgggctaatgctactgttcaaatgcaaggtaattattatggtactcctccttatttaatttctcctttagaagctgctaaagcttctggttttactgttaattatgcttttggtactaatatttctactgattctactcaatggtttgctgaagctattgctgctgctaaaaaatctgatgttattatttatgctggtggtattgataatactattgaagctgaaggtcaagatcgtactgatttaaaatggcctggtaatcaattagatttaattgaacaattatctcaagttggtaaacctttagttgttttacaaatgggtggtggtcaagttgattcttcttctttaaaagctaataaaaatgttaatgctttagtttggggtggttatcctggtcaatctggtggtgctgctttatttgatattttaactggtaaacgtgctcctgctggtcgtttagtttctactcaatatcctgctgaatatgctactcaatttcctgctaatgatatgaatttacgtcctaatggttctaatcctggtcaaacttatatttggtatactggtactcctgtttatgaatttggtcatggtttattttatactgaatttcaagaatctgctgctgctggtactaataaaacttctacttttgatattttagatttattttctactcctcatcctggttatgaatatattgaacaagttccttttattaatgttactgttgatgttaaaaatgttggtcatactccttctccttatactggtttattatttgctaatactactgctggtcctaaaccttatcctaataaatggttagttggttttgattggttacctactattcaacctggtgaaactgctaaattaactattcctgttcctttaggtgctattgcttgggctgatgaaaatggtaataaagttgtttttcctggtaattatgaattagctttaaataatgaacgttctgttgttgtttcttttactttaactggtgatgctgctactttagaaaaatggcctttatgggaacaagctgttcctggtgttttacaacaa

SEQ ID NO: 181 - DNA, 3384 bp, Trichoderma reesei
  source 1..3384: mol_type = genomic DNA
tttttgctgtcagagatcagcggaaacaagcaacaaagttcctgcgacgatctgcggagaatggcctccataataatagcctgtataggcaggacgtcaaccgagaggaaatatgatggcttctagggcagtatcaatgctacggccattagctgctgggcatcttctccatcggcccgatggggggccatggacgatggcgactgggctgagcgaggaagaaaaaaacagacatggcagtgtgaagcggtaagacgatggcaggcgagtgaggaccaatgtttctttatatagatgttgatcgtgggttcggggatgctcgctttataatgctcccccttgcttcgggtgattgtagcgagtatccagggtgtgtttgcttgatcgcgtttctttaataacgcgggcatcgtctcgatattcgttcccttttctcctacctcgttctgtatcgacgacgaaaccctcggttttgctcgtcttccactccttttcccaccatgatgaagtcgctggccgtcgtggccgccctcctcgggctcgccacggcctcgcccgccgccgtccgcaaccagacccgcgtcgaagcccacgtcgaagcaagcagcagcacctctttctggtacgccgccatggaccacaccggccaatacaagggctacgcgcctcacgccccgagcccgggctcgtacagcgtcttcgtggccgtcaacgccggcgacggaggctcgctccagcaggccattgactcggctggcagcagcggcaaccgccagaacgagtggctgtcgtcgcagccccgagtggtgtacatcccgccgggcacttacacgctgtcccagacgctcaacatgcgcaccgacacgatcctcatgggcgacgccaccaacccccccgtgatcaaggcggcggctggcttcagcgggaactacctcgtcaacggccaggatccgtccacgggcgtgtccggcgagctttcgtttgccgtcggcctcaagaacgtcgtcctcgacaccacggccgtcagcgccacgtccagcatctctgccctgtactggggtgttgcccaggccgctcagctgcagaacgtcaagattgttcttgcgccctcgagcggtggcaagggccacacgggtatccagctcggccggggatcgaccctcggcctggcggacgtgaggatcgaaaacggccagacgggcatctggcacaacggacaccagcaggcgctgtacaagagcatctacttctaccgcaacacggtgggcatgctcatcagcggcggcaacaccatcacgctgctgaacccgacctttgacaccgtcggcaccggcgtctccaacacgggcggcagcccctttatcggcatcgtcgacgccacgtccatcaactcgggcgtcaccttcagcaccaccgtctacccgtcgattgtcattgacaacctgaccaaggacaccagctccgacgtcgtcgtcctgcgcggcgcgacggccctcggcgcctcgtcccacgtcgtcaactacagctacggcaacaccgtcggccgcaaccccatctacggcgccgtctccggaagcacggcccggcccagcgccgtcgcccccggcggccgcatcccggccgttgccgcgcccaactttgcccagaaccccgtgacggactttgtcaacgtcaaggaccccggccagaacggcggccagacggtcaagggcgacggctcgacggacgactcggccgccctgaacaaggtgctgcagtttgctgccgccaacaacaagattgcctacttcccctttggcgactaccgcgtgctttcgacccttgtcgtccccgttggctcgaggctggtcggcgaggcgtgggcgaccatctccggtggcggcaacctcttcaaggacgcctccaacccgaagcccatcgtccaggtcggcaacgccggcgacgtcggcgttgctcagatccaggacatgcgcttcaccgtctccgacgtcctgcccggcgccatcatcgtccagttcaacgctgccggctccaagcccggtgacgtcgcgctcttcaactcccttgtcactgtcggaggaacccgtggcgcggacggcctgaccaacacctgcaccaaggccaacagcgaatgcaaggctgctttcctcggcctccacttcaccgagagctcgtccgcctacgtcgagaacacctggaactgggttgccgaccacatcaccgagggcttcagcggcggctccaacattgccgccaagggaggtgccctcgtcgagtccaccaagggaacctggctgcacggcctcggcagcgagcactggtggctgtaccagctcaacctcaagtctgccagcaacgtcgtcgtctccctcctgcagagcgagaccaactacgaccagggcgacaacacgcagcaggtgcctcctgcgccgtggactgtcgacgtccagggctggggagatcctgacttttcgtggtgcgacagctctgctcgttgccacatgggtctggccaactacgtgcagggcggatccaacatttactactttggctctgcctcgtgggctttcttcagcggccctggatatcagggctgcgcttctggtggttaccagtgccagggtaagtcgatattctcttccagacggaattcatggagtccttttctttttttttttttttttttttttttttttgctaacagcttcggatagactacatgcacgttgtcaagacgacgcctacgaacctccagatgtacggcatgtgctccaaggacaccaaggttgctctccgactgggcaacggcaccgatatcaatgctcaggatggcttcactggcggctggagccctggtggcgacgttggtcgctacaccacctaaacttggacgacggatagaggctacctttgatatcgaagacaataatgtgtaaatctgctcccaatacttggacatcatggagcgttgcctattaactagatataatgtgtatccaatgtataatgccatcatgcagatgtatatggccaagcgcgcgagaacatggactgattgtgacaagacatgtgaatctctttcaaccatgtattcttcagcctaggtaaggtacttgtcaatttgttcggctccagggttggcaatgactttggctttgcctctggaggactttacggtcagtgacttacacgactgggccaaactcgtgaaagacaacgtgcattgaggtagggaacgagcagagtcccaacaagccctcaatgactacctcttcatcaaagctcccggtttcatttcaatagcaagaaagtaacggtgagagtagcgtctctggatggccagagttatcaaagtgcatgcctcctttgagaactacacgcgaa

SEQ ID NO: 182 - DNA, 2030 bp, Talaromyces pinophilus
  source 1..2030: mol_type = genomic DNA
tctgtttcagacactggtcacccattgcattatgacggtgttaagtggtggtggggccgactccgagacatgaaactgacaatacgacaagttgttttatgtctgacattcctcaagctagaatcatatgacttacaggggtctaaaatatgcggttttggaaagtttcatcgaatatattaacatcaactattgagtcaactgccatgaactgccgaataccctcaatatacgatattaggctaattcaatggtgtttggattggtggacattttgcactcagctccatttactttccccgatgtgagaattgaaattaaatgatcatcagatatattatatcttgtttcactaattttaaaagaattgaccgtcggttaatagcttgcaccaaccctacccaagggtggtataagaagaggactgagagactgtgcatttaggagctcaccagtattcaaaattccagaagctttcttcctacaaccttttggacacaatgcatttcctcgccgcgttgctcgcggttctgccacttgtatctgggtctccagtacccgagaaacgatgtaagttgtatccacctgaacagtgaaagctggacggtattgacaatcacagccggatgcgcacttccctctacgtacaagtggacatccactggcccgctggcaagccccaagtcgggtttggttgctctgagagactatagccatgtcatctacaacggccaacatctcgtatacggatcgaccgccaacacagctggcagctatggttccatgaactttggcctgttttcggactggtctgagatgtcatctgccagccaaaacacgatgagcactggcgccgtcgctcccacgatcttctactttgcaccaaagagtgtctggatccttgcctatcaatggggtccatatgcgttttcctacaggacttctaccgatccttccaatgccaatggctggtcatcgccacagcctcttttcacgggaactatttccggctccagtaccggtgtcatcgatcagacagttattggcgatagcgaaaacatgtatctcttctttgctggagataatggccatatttaccgtgctagcatgcccattggagactttcctggaagtttcggctcagcatcgacgattgtcctcagcgactcgactaacaacttgttcgaggcggtagaggtctacaccgtcgagggtcaaaatcaatacctcatgattgtcgaggcaattggtgccaatggacgttatttccgctccttcacagctagtagtctgggaggcacatggacggcgcaggcttcaaccgagtccaacccattcgctggcaaggctaacagtggcgccacctggaccaacgacatcagcagcggcgatttggtccgtactaatcccgatcagacacagacgatcgatgcctgcaatctacaattcctctatcaaggacgatccaccagctccggcggcgactacaaccttcttccttaccagcctggtctgttgacacttgcttaggcgacttccgttattggtccgggtaatttcagttcgaaaatgagacattaagatcaattgaaatagtaggatagaatgtgaaataagcactatgaagctctccttgaatattcccataatacaattgtacattaggcagacatgtatggaggataagactatccacatcatggaatcctctttttaatcatctttgtggctgctctccatagacaatctgagcggtgcgggttggaataggggggttggagagcctgaatatccaaggatgcggagtgcaggcaaggacggatgtcgtgcacggtattttttactatcttcctactcatgtttccatgtggagggttgttcttgaagagattgaattgaatcatttgtcctatttggcgactaagctaatgagaagagctacacagtatagtttgcacgaagcatagacaattccatggttacggcagatctggccgtgaaagcaatacagccactttctactgagtgac

SEQ ID NO: 183 - DNA, 11442 bp, Trichoderma harazianum
  source 1..11442: mol_type = genomic DNA
taatcgaccgacggaattgaggatatccggaaatacagacaccgtgaaagccatggtctttccttcgtgtagaagaccagacagacagtccctgatttacccttgcacaaagcactagaaaattagcattccatccttctctgcttgctctgctgatatcactgtcattcaatgcatagccatgagctcatcttagatccaagcacgtaattccatagccgaggtccacagtggagcagcaacattccccatcattgctttccccaggggcctcccaacgactaaatcaagagtatatctctaccgtccaatagatcgtcttcgcttcaaaatctttgacaattccaagagggtccccatccatcaaacccagttcaataatagccgagatgcatggtggagtcaattaggcagtattgctggaatgtcggggccagttggccgggtggtcattggccgcctgtgatgccatctgccactaaatccgatcattgatccaccgcccacgaggcgcgtctttgctttttgcgcggcgtccaggttcaactctctcttaattaattggcggtgatattgatggcacgatagaagcagcacattctgtccctagacttagagattatcatgaagatattctcgatcaaatgctttttgcgctctttctcagcaaaagacatgctgatgcagcgaagctgctggaaagtattttcggtacgattttgacatttgctccattgtcgaggatggatggaacgagcggcgtgcgccacgaaagtgaggctattgcctatcagctctttgctacattccggaaacaaacatccctttttgtgaattatctacgcaacttagatggcgtgaacgcatcttcaaagtctttcggcaggtccggcacgacttttgcatccagagaagcgcctacatgtgtattcgaccacctcctagcgcgcttggatatgaggaaatattactgagagtcgaaaacaagctccaccgcaccagctcttcttggagttttatattaaagaatattcccagctcgttgtattattctttttctaccgtgctaatgtatcaaggactttggtacctattaacgttattattcgtgtgctattcccaaacataaccctgtatatgtttcgaacgccgttatgacccatgtcttacatactcattaagtcattcccttggataatcccaatttagaagaagtgaaggtctgattctttccatccttccgccaacagtatcctccgagccgattcttccatggctggcggaccacaaatcaggaccatactctcatcttctggagccgcgtactcctttaggagctcttcggatatgcgtcctcggcggccagtccatgagtccggcgctttggatagggtgtgtattatattacaccttctgctgtcggttgccatgaagccgtcgagctcagcccggcaaaggatatcttcctcctgtctgtttccattgaggactgtacaagaggtgggatcttgccggtcctgaaccacggcgcgcaagacctggaagatcggtgtgataccggttcctccacaaatcatcttaaacgaccgaacatggcgttccttcccacttatgacaactcgtccatttccaaggtattcgaatctgcctgtcggacccttgcattccaccacggagcccaatggcagcctatccagggccatcgtcatcttgccgcctgccgaggtggctgttgcaaagtatactttaaccagcaagtccacggtccctttctggctggtttcagaaattggggtgtatgagcggatgatggcttcgttgttggatgatgtgtcgaggactttgatcataagatgctggccgactggtaaacccaatgtttgatcttcgtgttccaatttgaaactaaatattcgtgtatcccaggatatgtctttcctttctttcaatgttgcctttgtccaagaccgtgattggaggaacactgggcgaatttcatcggtggaggatgatgcatcatccttgagtgcttttaaaccttccgggtccatcgttccaatatggtactcaggcatcatcgcctttgccgtctcgctatctatggataggtgtcaatagatggtacaattgcagtgtgatatttttgggactcacgaatagcaaggaattcctcagagacatccagaccagcagaggagataatactctgcgctccgccagggtggccttcaagaaatgcttgaccatcatacacttctccattcacgatgaaccatggcttctcatcgcaggaattctccttgaattcttcaaaaccaatcactcggcttagcccgtctttcttcatattaatgtcttgcacgggctccggctccgtcggctcctctccttcgtgtctttctccccagttaccattcgtcaggtcacccccagcctttttgacgcgttccatccatcctgtaggcatactagggtgggtagggtgctcgaatctcaagttcccgttttccttcgtaattgtaacccggaaccacgggttgttcatcattccgagaacggaccagtacatatcgcgaggctgcacgcccaatgcttcgtccatggctcttacaaggatggcatcactgttctcaagctctgggatggtgatgcttagagaccaaaaacaccagcagaagcaagtttcgcgccagtacatatctactttgcctccaaaaagctcgccttcaaaatcacgatacttgtcttcggcatattcgatttccgccaatctccaagctataagtccgttagctttgataagcattctcacacatcgagcgagcgagggtgcgtacatttgcctttgtctagggatatttctaccctggtaaccctgcggcccccaccggcgtatgcatatcctctgacagtatatgacggccctgccgacaggagatttaagacctcattgttttggggatatgcaacggcggagttggtgtttaggtcataaatcgcataccgctcatcgtgccaccaatttcggttatttgatgccatctcaggcgagaccattgttctgggttagggagttagacaaatgatggaaatataaaataagtgccctttagacatacggtaagacgcggttgtcattgatatggtaccagttgtcgcttggtgcatcggtcaagatcagcctcttcagccacttaacacttcgtcctcctatttgaccgggcacgacggccctcagcggacgaccatgatctgggcgaagagactccccgttcattttatgtgcaagcatgatccccctgttggggtccagggcccagttcaatttaatagatgtgccgtagtgaccattgggctgcggcgaacttagcaattatcatcataagatagaggtacagcataccagcttatccgctccttccatacagacgtatttcgctttacgcaggggtttcgcactgcggagaatatccgccagcaatgggccagtgaagagggcagtcgatagtcccgccgatccccaggaaaaacctttcgttttacgtacaatgttttgctctttgcgtcgattgccagcacatacgagggtgataggcgctgttatttggtcgtactgctgcaacacttgtcggaagtttagtaccaaaggcttctctaccagtctatactttggttaacggatgtttggcagagaacctagcactatactaacccttcgatgctaatttcccagtgagggatatcttcatccttgatatgagggactgggccatgatttcgaacatagaagagctccggcgatgttaaaaaccctttcagagtgtgagaatgtaacggctcaaggggacaagcatgacagccggtgcaagcaacctgataaggataggagtggagcagttataactcataccttctttatacagatctcgagctcgcgaaagcttactagtgcatgcgtttctgcattaatgaatcggccaacgcgcggggagaggcggtttgcgtattgggcgctcttccgcttcctcgctcactgactcgctgcgctcggtcgttcggctgcggcgagcggtatcagctcactcaaaggcggtaatacggttatccacagaatcaggggataacgcaggaaagaacatgtgagcaaaaggccagcaaaaggccaggaaccgtaaaaaggccgcgttgctggcgtttttccataggctccgcccccctgacgagcatcacaaaaatcgacgctcaagtcagaggtggcgaaacccgacaggactataaagataccaggcgtttccccctggaagctccctcgtgcgctctcctgttccgaccctgccgcttaccggatacctgtccgcctttctcccttcgggaagcgtggcgctttctcatagctcacgctgtaggtatctcagttcggtgtaggtcgttcgctccaagctgggctgtgtgcacgaaccccccgttcagcccgaccgctgcgccttatccggtaactatcgtcttgagtccaacccggtaagacacgacttatcgccactggcagcagccactggtaacaggattagcagagcgaggtatgtaggcggtgctacagagttcttgaagtggtggcctaactacggctacactagaagaacagtatttggtatctgcgctctgctgaagccagttaccttcggaaaaagagttggtagctcttgatccgacaaacaaaccaccgctggtagcggtggtttttttgtttgcaagcagcagattacgcgcagaaaaaaaggatctcaagaagatcctttgatcttttctacggggtctgacgctcagtggaacgaaaactcacgttaagggattttggtcatgagattatcaaaaaggatcttcacctagatccttttaaattaaaaatgaagttttaaatcaatctaaagtatatatgagtaaacttggtctgacagactagtgcatgccctagggtcgacttaagcaaggattttcttaacttcttcggcgacagcatcaccgacttcggtggtactgttggaaccacctaaatcaccagttctgatacctgcatccaaaacctttttaactgcatcttcaatggccttaccttcttcaggcaagttcaatgacaatttcaacatcattgcagcagacaagatagtggcgatagggttgaccttattctttggcaaatctggagcagaaccgtggcatggttcgtacaaaccaaatgcggtgttcttgtctggcaaagaggccaaggacgcagatggcaacaaacccaaggaacctgggataacggaggcttcatcggagatgatatcaccaaacatgttgctggtgattataataccatttaggtgggttgggttcttaactaggatcatggcggcagaatcaatcaattgatgttgaaccttcaatgtagggaattcgttcttgatggtttcctccacagtttttctccataatcttgaagaggccaaaacattagctttatccaaggaccaaataggcaatggtggctcatgttgtagggccatgaaagcggccattcttgtgattctttgcacttctggaacggtgtattgttcactatcccaagcgacaccatcaccatcgtcttcctttctcttaccaaagtaaatacctcccactaattctctgacaacaacgaagtcagtacctttagcaaattgtggcttgattggagataagtctaaaagagagtcggatgcaaagttacatggtcttaagttggcgtacaattgaagttctttacggatttttagtaaaccttgttcaggtctaacactgccggtaccccatttaggaccacccacagcacctaacaaaacggcatcagccttcttggaggcttccagcgcctcatctggaagtggaacacctgtagcatcgatagcagcaccaccaattaaatgattttcgaaatcgaacttgacattggaacgaacatcagaaatagctttaagaaccttaatggcttcggctgtgatttcttgaccaacgtggtcacctggcaaaacgacgatcttcttaggggcagacatactcttcctttttcaatattattgaagcatttatcagggttattgtctcatgagcggatacatatttgaatgtataaactagtgcatgcaagcttattagtgataccccactctaagaaaatagaccaatctccagctgcaccttcagacactccggtacaaattctcgtctatgttggagattgttgtgactttgaaacatgacccttgaccctgattttgaatttgtccatatatcgaggcaggtgtcttattcgtacggagagggtatctgtcgtagacacatagtagtagtcatttcgagtgctgaatttataaatcgcatcatacttgcgacatactgccataaaaggagtacgtatccaccactacttattgcgcaccaacacgcttcaggtatgcatcccatccctccttctggtactgcttcgccgcctccacgggatcaggagcagcataaattccacggccagcaataataaagtcggcaccgcgtccaacagccgactcaggagtttggtactgctgtcccagcttgtcacccttcgaggagaggttgacacctgtcgtgaagacgacaaaatcttcctcctccgaaggcgagctaacttcagactgaacctcgccaaggtgacgtgtcgagacgaatcccatcacaaacttcttatacttccgagcatagtcaacagaagaagtagtatattgaccggtagccaaagatcccttggaggtcatctccgcaaggatcaaaaggcccctctcggagccgtaggggaagtcctcggccgaagcagtctgggccagagcctcgacgataccctcaccgggcagaatactgcagttgatgatgtgggcccactcagagatacgcagagtgccgccatggtactgcttttggactgtgtttccgatatcgatgaacttgcgatcttcgaagatgaggaaattgtgcttctctgcaagggccttcagaccggtgatggtttcttcgctgaaatcggagaggatatcgatgtgagttttgatcacggcaatgtacggaccgagtcctgttatataatccaccattaaccattactagatcacatgtaagtggcatccccggtgcgcatacggtcagccaaatccagcagctctttggtggttgtcacgtcggcggaaacggtgacattggttttcttggcctcggcaacctcgaagagcttctttacgagcgcattggggtgcttgctagcgcgtgcgctgtaggtcaattgcgacttggaagacatggtgccgcggcaatgaggatcatctgttagccattccatcaacaggaagaacgagagaaggcatgatccttttcgctggtattatccagatcaagttttagccgtataatctcagaacgaacccagtccatcgatgccatgtccttctagactaggatcctagagtctagggcccagcttagggagggcatgtgaatgcatcgatgactgggaacgaacaccggcccacgccaaagacgttacctaagataccttgatcattgtgagagtccagccaaaagtattccatgacttccatcgtatgccctctagagggctaatcgaggagtgtatttacattgtcggttggtttgggaactatagaagatggtcagttattccaatcaccaaaggtttatcgaagggaggaagacttgttcagtttcgtccgaggacttttggaattcaaatctgagatagagaattgtgtgggatgagaggaaaaggaagaagatggtggggttcagaaggaggggttgagttaaatagcatgggttgagtcaacgtgataagggcactataccgtatagatcagcggcacccgattctatccgttccttttgctcctctttagctttgaccggtgagccggacaagaaacaagtgaaatcatcctgacatcggcggacgatctcctagcttttacatttcgttaccaatgggatcccgtaatcaattgcccgtctgtcagatcgaggaatggtggatcatctgatccactatataacatagtactctgtccacggttagttaacatttatccaaaaacagaaaatctccacgactggaaccttttcaatagtgaaacctaagtattagcaaataatcgttacccccactcgcactccataatccttgatccagttctttttctttccgactttctcgactttctccgccctttcctgtaagctgtcaagagagaacgcggcgacagccacatcgttgttgcatttcactttgagacgcagcatatcgcactcgtctttcttcttcacaatggattcccattcagtttccaatcggatcctccaatgcatgtccgacacgcggccggatggatgcacgtctccaattagggtcgctacccgacccaagtactgacaccaccatgcctcctgcttagagacacaccggctcaattgccggtgaaattcttcatcggtgggtgcaaggtcccctgcccagcgctcacagagtatcaaggcaatcagggcacgttcggtgtgtgatagtgtatttaccgaaggcgcgccttccgttaaattgccgtcgtcagccgttaaattaccgattaatcccgataaatttccgagatctccgttaaattgccgttcgcagccgttaaattaccggggacgaccgataaatttccgcgatgaattcatggtgttttgatcattttaaatttttatatggcgggtggtgggcaactcgcttgcgcgggcaactcgcttaccgattacgttagggctgatatttacgtaaaaatcgtcaagggatgcaagaccaaaccgttaaatttccggagtcaacagcatccaagcccaagtccttcacggagaaaccccagcgtccacatcacgagcgaaggaccacctctaggcatcggacgcaccatccaattagaagcagcaaagcgaaacagcccaagaaaaaggtcggcccgtcggccttttctgcaacgctgatcacgggcagcgatccaaccaacaccctccagagtgactaggggcggaaatttatcgggattaatttccactcaaccacaaatcacagtcgtccccggtaatttaacggctgcagacggcaatttaacggcttctgcgaatcgcttggattccccgcccctggccgtagagcttaaagtatgtcccttgtcgatgcgatgtatcacaacatataaatactagcaagggataccatacttggaggatagcaaccgacaacatcacatcaagctctcccttctctgaacaataaaccccacagaaggcatttcaccatgatgttgggcgttgtccgccgcctcgggctcggcgcccttgctgccgcagctctgtcttctctcggcagtgccgctcccgccaatgttgctattcggtctctcgaggaacgtgcttcttctgctgaccgtctcgtattctgtcacttcatgattggtattgttggtgaccgtggcagctcagcagactatgatgatgacatgcaacgtgccaaagccgctggcattgacgcattcgctctgaacatcggcgttgacggctataccgaccagcaactcgggtatgcctatgactctgccgaccgtaatggcatgaaagtcttcatttcattcgatttcaactggtggagccccggtaatgcagttggtgttggccagaagattgcgcagtatgccagccgtcccgcccagctgtatgttgacaaccggccattcgcctcttccttcgctggtgacggtttggatgtaaatgcgttgcgctctgctgcaggctccaacgtttactttgtgcccaacttccaccctggtcaatcttccccctccaacattgatggcgccctcaactggatggcctgggataatgatggaaacaacaaggcacccaagccgggccagactgtcacggtggcagacggtgacaacgcttacaagaattggttgggtggcaagccttacctagcgcctgtctccccttggtttttcacccattttggccctgaagtttcatattccaagaactgggtcttcccaggtggtcctctgatctataaccggtggcaacaggtcttgcagcagggcttccccatggttgagattgttacctggaatgactacggcgagtctcactacgtcggtcctctgaagtctaagcatttcgatgatggcaactccaaatgggtcaatgatatgccccatgatggattcttggatctttcaaagccgtttattgctgcatataagaacagggatactgatatatctaagtatgttcaaaatgagcagcttgtttactggtaccgccgcaacttgaaggcattggactgcgacgccaccgacaccacctctaaccgcccggctaataacggaagtggcaattactttatgggacgccctgatggttggcaaactatggatgataccgtttatgttgccgcacttctcaagaccgccggtagcgtcacggtcacgtctggcggcaccactcaaacgttccaggccaacgccggagccaacctcttccaaatccctgccagcatcggccagcaaaagtttgctctaactcgcaacggtcagaccgtctttagcggaacctcattgatggatatcaccaacgtttgctcttgcggtatctacaatttcaacccatatgttggcaccattcctgccggctttgacgaccctcttcaggctgacggtcttttctctttgaccatcggattgcatgtcacgacttgtcaggccaagccatctcttggaaccaaccctcctgtcacttctggccctgtgtcctcgctgccagcttcctccaccacccgcgcatcctcgcctcctgtttcttcaactcgtgtctcttctccccctgtctcttcccctccagtttctcgcacctcttctccccctccccctccggccagcagcacgccgccatcgggtcaggtttgcgttgccggcaccgttgctgacggcgagtccggcaactacatcggcctgtgccaattcagctgcaactacggttactgtccaccgggaccgtgtaagtgcaccgcctttggtgctcccatctcgccaccggcaagcaatgggcgcaacggctgccctctaccgggagaaggcgatggttatctgggcctgtgcagtttcagttgtaaccataattactgcccgccaacggcatgccaatactgttagtgaaaatggtgatcgacacctggcggtagacaatcaatccatttcgctatagttaaaggatggggatgagggcaattggttatatgatcatgtatgtagtgggtgtgcataatagtagtgaaatggaagccaagtcatgtgattg

SEQ ID NO: 184 - DNA, 2263 bp, Trichoderma reesei
  source 1..2263: mol_type = genomic DNA
tgccccctgagatccgtctccagttcatatccccaaagttaacgggtcaatcaaggccaccagcccattccattcacacagcatcagctacaaccctgccatgtttggtcttgtccgccgactcggggtcggcgcccttgtcgccgcagccctttcctccctcgctgccgccgcgccagccaacgtcgccatccgctccctcgaggaacgggctagcagcgcagatagacttgtgttttgccactttatggtgcgtttgtccgccccaagagcattgaaaattcagtaatcactgacacgccttactcgtgatgctagattgggatatgtggtgatcgcacctccagtaccgattatgatgatgatatgcagcgagccaaggccgcgggcattgacgcctttgcccttaacattggtgtcgacggatacacggaccagcagctcaactttgcctacgacgccgctgatcgcgccgggatgaaggtgttcatctcctttgacttcaactggtggagccccggcaacgcggcaggcgtcggccagaagattgcccaatatgcgtcgcggcccgcacagctctacgtcgacaaccgtccctttgcatcgtcgtttgccggtgacggccttgacgtgaatacgctgcggaatgcggccggcagcaacgtgtactttgtgcccaacttccaccccgggcagtcgtcgccgtccaccatcgacggggctctgaactggatggtacgtctgggcgttgtggctcgaggataaagcaaagaccaagtactcatgcgctgacacgctccacaggcctgggacaacgacggcaacaacaaggcccccaagcccggccaaaacgtcacagtcgccgacggcgacaactcctaccgcagctggctcgccggcaagccctacctcgcccccgtctcgccctggttcttcacccacttcggcccagaggtatcgtacagtaagaactgggtcttccctggcggctccctgtggtacgaccgctggcaggacgtgctgcgccagggcttcgagatggtcgaaatcgtcacctggaacgattacggtgagagccactacacggggcccctggaaagtcgacactatgacgacggaaactcgaaatggaccaacgacatgccgcacgacggcttcctggacctggcgaagccattcattgccgcgtacaagaaccgcgacacggacgtggcgccctacatccagaatgagcagctgatctactggtatcggcggaatctcaaggggctggactgcgacgcgaccgacacgacgtcgaaccgcccggcgaacaacggcagcggcaactacttcatgggtcggcccgacgggtggcagacgatggacgacacggtgtatgtggtggcgctgctcaagagcgcgggcacggtgacggtgacgtcgggcggcgccacgcagacgttccagggcaccgccggcgccaacctgttcgaggtcccagccaaccttgggcagcagaagtttgccctgtcccgcaacgggcagaccgtcttcagcagcacgtcgctgatggatatcaccaatgtgtgcccgtgcggcatctacaacttcaacccgtatgtcgggactgtgcccgctggctttgacgacccgctcgggcccgatggccttgcttctttgacaatcggactgcacgtcacgacttgtcaggccaagccgtcgctggggaccaacccgcccatcacttccggccccggctcctcggtgcccgtttccactccgcccggttccacgacccgcttctcgtcaacgccggtttcatctcgctccagctcgtccacgccgccggttagcacgccgccgcctggccaagtctgtgtcgccggtacggtggctgacggccagtccggcaactatattggcctctgcaacttcagctgcaagtaagttaccccatgtctcatgacgatgtatctccgacaccagctaacgtttgccagcttcgggtactgtccccccggaccctgcaagtgcactgcctacggcgctccgatcaacccaccagcaacgaatgggcgaaatgggtgccccttgcctggagaagacgatagttatctgggcctctgcagcttcagctgcaaccacaattactgtccgccaacagcatgccagtactgctgaaggcagttttctcagaccactgctgaagttttcacccaggcgacgtatttgggtaggggagaatagggggaactcgatgggcgggatgcagtcaccacat

SEQ ID NO: 185 - DNA, 11893 bp, Salipaludibacillus agaradhaerens
  source 1..11893: mol_type = genomic DNA
ctagagcggccgccaccgcggtggagctccagcttttgttccctttagtgagggttaattgcgcgcttggcgtaatcatggtcatagctgtttcctgtgtgaaattgttatccgctcacaattccacacaacatacgagccggaagcataaagtgtaaagcctggggtgcctaatgagtgagctaactcacattaattgcgttgcgctcactgcccgctttccagtcgggaaacctgtcgtgccagctgcattaatgaatcggccaacgcgcggggagaggcggtttgcgtattgggcgctcttccgcttcctcgctcactgactcgctgcgctcggtcgttcggctgcggcgagcggtatcagctcactcaaaggcggtaatacggttatccacagaatcaggggataacgcaggaaagaacatgtgagcaaaaggccagcaaaaggccaggaaccgtaaaaaggccgcgttgctggcgtttttccataggctccgcccccctgacgagcatcacaaaaatcgacgctcaagtcagaggtggcgaaacccgacaggactataaagataccaggcgtttccccctggaagctccctcgtgcgctctcctgttccgaccctgccgcttaccggatacctgtccgcctttctcccttcgggaagcgtggcgctttctcatagctcacgctgtaggtatctcagttcggtgtaggtcgttcgctccaagctgggctgtgtgcacgaaccccccgttcagcccgaccgctgcgccttatccggtaactatcgtcttgagtccaacccggtaagacacgacttatcgccactggcagcagccactggtaacaggattagcagagcgaggtatgtaggcggtgctacagagttcttgaagtggtggcctaactacggctacactagaaggacagtatttggtatctgcgctctgctgaagccagttaccttcggaaaaagagttggtagctcttgatccggcaaacaaaccaccgctggtagcggtggtttttttgtttgcaagcagcagattacgcgcagaaaaaaaggatctcaagaagatcctttgatcttttctacggggtctgacgctcagtggaacgaaaactcacgttaagggattttggtcatgagattatcaaaaaggatcttcacctagatccttttaaattaaaaatgaagttttaaatcaatctaaagtatatatgagtaaacttggtctgacagttaccaatgcttaatcagtgaggcacctatctcagcgatctgtctatttcgttcatccatagttgcctgactccccgtcgtgtagataactacgatacgggagggcttaccatctggccccagtgctgcaatgataccgcgagacccacgctcaccggctccagatttatcagcaataaaccagccagccggaagggccgagcgcagaagtggtcctgcaactttatccgcctccatccagtctattaattgttgccgggaagctagagtaagtagttcgccagttaatagtttgcgcaacgttgttgccattgctacaggcatcgtggtgtcacgctcgtcgtttggtatggcttcattcagctccggttcccaacgatcaaggcgagttacatgatcccccatgttgtgcaaaaaagcggttagctccttcggtcctccgatcgttgtcagaagtaagttggccgcagtgttatcactcatggttatggcagcactgcataattctcttactgtcatgccatccgtaagatgcttttctgtgactggtgagtactcaaccaagtcattctgagaatagtgtatgcggcgaccgagttgctcttgcccggcgtcaatacgggataataccgcgccacatagcagaactttaaaagtgctcatcattggaaaacgttcttcggggcgaaaactctcaaggatcttaccgctgttgagatccagttcgatgtaacccactcgtgcacccaactgatcttcagcatcttttactttcaccagcgtttctgggtgagcaaaaacaggaaggcaaaatgccgcaaaaaagggaataagggcgacacggaaatgttgaatactcatactcttcctttttcaatattattgaagcatttatcagggttattgtctcatgagcggatacatatttgaatgtatttagaaaaataaacaaataggggttccgcgcacatttccccgaaaagtgccacctaaattgtaagcgttaatattttgttaaaattcgcgttaaatttttgttaaatcagctcattttttaaccaataggccgaaatcggcaaaatcccttataaatcaaaagaatagaccgagatagggttgagtgttgttccagtttggaacaagagtccactattaaagaacgtggactccaacgtcaaagggcgaaaaaccgtctatcagggcgatggcccactacgtgaaccatcaccctaatcaagttttttggggtcgaggtgccgtaaagcactaaatcggaaccctaaagggagcccccgatttagagcttgacggggaaagccggcgaacgtggcgagaaaggaagggaagaaagcgaaaggagcgggcgctagggcgctggcaagtgtagcggtcacgctgcgcgtaaccaccacacccgccgcgcttaatgcgccgctacagggcgcgtcccattcgccattcaggctgcgcaactgttgggaagggcgatcggtgcgggcctcttcgctattacgccagctggcgaaagggggatgtgctgcaaggcgattaagttgggtaacgccagggttttcccagtcacgacgttgtaaaacgacggccagtgagcgcgcgtaatacgactcactatagggcgaattgggtaccgggccccccctcgaggtcgacggtatcgataagcttgatatcgaattcctgcagcccaacaaagaatacaagaaaatatttacaaaaaatcaatttaacaattccttaaaacatgcaggaattgacgatttaaacaatattagctttgaacaattcttatctcttttcaatagctataaattatttaataagtaagttaagggatgcataaactgcatcccttaacttgtttttcgtgtgcctattttttgtgaatcgacctgcaggcatgcaagcttaagcgagttggaatttaaatatgatatctacattatcagcagtaacatcaacctttgatacaaggttgttgacgattttctttttattatcatatgatagttcattaatcggaattgagcccaactgagttttaactaactcaaaaacatcagtagagtcattaaatttattttcgctaatcttagctttaagcagctttttctcagcctgaagggaatcagtacgatctttcaactcatccatagtgataaaatcatttaggtacaaatcagagttcttttgtatttttttatcgatctgtgaaatttgctttttaaatgacgaagtatcaagaataggttggttgttgccattgataattttcaataaggagtcattattttcttgaaatccaatcaggttgtcaataacagtattttctaaattacttaaatcataagttcctgaatcacactttttattgtcattatatactgtaattccttttgtttttcgaggaaatctatttgcacagtgatatttcatagtgcggcttccatcttttcttttgtggccaagaacaatttttaaaggtgctccacagtaaccgcaccttgccatccctgacagcatatatttagcttggaaaggtctagggttgttatttctttcataagtctgctgttgtctttcttctagctctttttgaacttttaaataagtctcataagggataattggtttgtgcataccttcaaataggctgtccttaaatttgatataaccacagtaaactggattatcaagtgtttgtcttagggtacgataagaccacggtatatctttaccgatgtgtccagattcattgagtttatctcttaattttgtaagtgatattcctgataaataatcagtgaatatttgttcaactattgtagcttgtaaaggaacaatttctaatatacctgtctttctgttgtggtaatacccaaaagctgtcttagtccacatcatagacttaccagatttcgctcgccctagtttacccatagtcatgcgttcttttatattctctctttcaaactcattaattgcagaaagaatagtgagaaacaagctacccatagcagaagaagtatcaatactttcattaagcgagataaagtctattttattttttgtgaacacatccttaacaagataaagagtatctcttacactacgtgaaaggcggtctagcttatatacaagaactgtatcaaaagctttattctcgatatcgttgattaatctttgcattgctgggcgttcaagtttggcccctgaaaaaccagcatcagtataagtatcagatacttgccaccccattgcttcagcatattttgttaaacggtcaatttgctcatcaattgagaacccttcctctgcttggttagtagtggatactcgtgtatagattgctactttcttagtcatgagatttcccccttaaaaataaattcattcaaatacagatgcattttatttcatatagtaagtacatcacctattagtttgttgtttaaacaaactaacttattttcatcttatataacctcgtcagtattttcaatattttttttagttttttatgaacacattagatttaataaagggaagattcgctatgtactatgttgatacttaatttaaagattaaacaaatggagtggatgaagtggatatcgctgatcaaacctttgtcaaaaaagtaaatcaaaagttattattaaaagaaatccttaaaaattcacctatttcaagagcaaaattatctgaaatgactggattaaataaatcaactgtctcatcacaggtaaacacgttaatgaaagaaagtatggtatttgaaataggtcaaggacaatcaagtggcggaagaagacctgtcatgcttgtttttaataaaaaggcaggatactccgttggaatagatgttggtgtggattatattaatggcattttaacagaccttgaaggaacaatcgttcttgatcaataccgccatttggaatccaattctccagaaataacgaaagacattttgattgatatgattcatcactttattacgcaaatgccccaatctccgtacgggtttattggtataggtatttgcgtgcctggactcattgataaagatcaaaaaattgttttcactccgaactccaactggagagatattgacttaaaatcttcgatacaagagaagtacaatgtgtctgtttttattgaaaatgaggcaaatgctggcgcatatggagaaaaactatttggagctgcaaaaaatcacgataacattatttacgtaagtatcagcacaggaatagggatcggtgttattatcaacaatcatttatatagaggagtaagcggcttctctggagaaatgggacatatgacaatagactttaatggtcctaaatgcagttgcggaaaccgaggatgctgggaattgtatgcttcagagaaggctttattaaaatctcttcagaccaaagagaaaaaactgtcctatcaagatatcataaacctcgcccatctgaatgatatcggaaccttaaatgcattacaaaattttggattctatttaggaataggccttaccaatattctaaatactttcaacccacaagccgtaattttaagaaatagcataattgaatcgcatcctatggttttaaattcaatgagaagtgaagtatcatcaagggtttattcccaattaggcaatagctatgaattattgccatcttccttaggacagaatgcaccggcattaggaatgtcctccattgtgattgatcattttctggacatgattacaatgtaattttttatggaatggacagctcatctttaaagatgagtttttttattctaggagtatttctgaattcgagctcgttattaatctgttcagcaatcgggcgcgattgctgaataaaagatacgagagacctctcttgtatcttttttattttgagtggttttgtccgttacactagaaaaccgaaagacaataaaaattttattcttgctgagtctggctttcggtaagctagacaaaacggacaaaataaaaattggcaagggtttaaaggtggagattttttgagtgatcttctcaaaaaatactacctgtcccttgctgatttttaaacgagcacgagagcaaaacccccctttgctgaggtggcagagggcaggtttttttgtttcttttttctcgtaaaaaaaagaaaggtcttaaaggttttatggttttggtcggcactgccgacagcctcgcagagcacacactttatgaatataaagtatagtgtgttatactttacttggaagtggttgccggaaagagcgaaaatgcctcacatttgtgccacctaaaaaggagcgatttacatatgagttatgcagtttgtagaatgcaaaaagtgaaatcagctggactaaaaggcagagctcggtaccagatctaaagataatatctttgaattgtaacccccctcaaaagtaagaactacaaaaaaagaatacgttatatagaaatatgtttgaaccttcttcagattacaaatatattcggacggactctacctcaaatgcttatctaactatagaatgacatacaagcacaaccttgaaaatttgaaaatataactaccaatgaacttgttcatgtgaattatcgctgtatttaattttctcaattcaatatataatatgccaatacattgttacaagtagaaattaagacacccttgatagccttactatacctaacatgatgtagtattaaatgaatatgtaaatatatttatgataagaagcgacttatttataatcattacatatttttctattggaatgattaagattccaatagaatagtgtataaattatttatcttgaaaggagggatgcctaaaaacgaagaacattaaaaacatatatttgcaccgtctaatggatagaaaggaggtgatccagccgcaccttatgaaaaatcattttatcagtttgaaaattatgtattatggccacattgaaaggggaggagaatcatgattaaaattaacaagactattaaaatccttatgttgacgttactaatgatgtctttcgcgggtgcggcatatgcacataatccagtaacagatgaagaagtctatcattcgtttaacagtcatgattggcaaaactggaatatgtctgacggttggaaaaatgatgattactttttcgggtgtcattggagtcagaacagagttaacttttatggtgggcaaatggagttgtcactgcgtacaaactattcatacgcacctccttacaactatgagtgtgcggagtatacgaccaataatttttatggatatggattatacgaggtatctatgaaaccagcaaaggtatcaggggtcatttcttctttcttcacgtatacagggccttcctataatggagccccttgggatgaaattgacattgaatttttaggaaacgacacgactaaggttcaattcaattattacacagatggcgtaggagggaatgaaatactttatgacttaggattcgatgcagcggatagttataatacgtatgcattcgattggcaagaaaattatattaattggtatgttaatggccaacttgttgcaacagcaacggaaaacatacctagtaatcctagtaaaattatgatgaacatttggaatacgtatggtattgacgagtgggcaggaaggtattatggagaggatgccaatgcttcatataattgggttcgctatacacctaaccgttaaacgcgtaagctagcggccgcgtcgactagaagagcagagaggacggatttcctgaaggaaatccgtttttttattttgcccgtcttataaatttcgttgtccaactcgcttaattgcgagtttttatttcgtttatttcaattaaggtaactaaagatcctctagttctagaaaatgaatacggtaaggaaaatatgctgtatgcgactgtccatctggatgaaagagtcccacatatgcactttggttttgtccctttaacagaggacgggagattgtctgcaaaagaacagttaggcaacaagaaagactttactcaattacaagatagatttaatgagtatgtgaatgagaaaggttatgaacttgaaagaggcacgtccaaagaggttacagaacgagaacataaagcgatggatcagtacaagaaagatactgtatttcataaacaggaactgcaagaagttaaggatgagttacagaaggcaaataagcagttacagagtggaatagagcatatgaggtctacgaaaccctttgattatgaaaatgagcgtacaggtttgttctctggacgtgaagagactggtagaaagatattaactgctgatgaatttgaacgcctgcaagaaacaatctcttctgcagaacggattgttgatgattacgaaaatattaagagcacagactattacacagaaaatcaagaattaaaaaaacgtagagagagtttgaaagaagtagtgaatacatggaaagaggggtatcacgaaaaaagtaaagaggttaataaattaaagcgagagaatgatagtttgaatgagcagttgaatgtatcagagaaatttcaagctagtacagtgactttatatcgtgctgcgagggcgaatttccctgggtttgagaaagggtttaataggcttaaagagaaattctttaatgattccaaatttgagcgtgtgggacagtttatggatgttgtacaggataatgtccagaaggtcgatagaaagcgtgagaaacagcgtacagacgatttagagatgtagaggtacttttatgccgagaaaactttttgcgtgtgacagtccttaaaatatacttagagcgtaagcgaaagtagtagcgacagctattaactttcggttgcaaagctctaggatttttaatggacgcagcgcatcacacgcaaaaaggaaattggaataaatgcgaaatttgagatgttaattaaagacctttttgaggtctttttttcttagatttttggggttatttaggggagaaaacataggggggtactacgacctcccccctaggtgtccattgtccattgtccaaacaaataaataaatattgggtttttaatgttaaaaggttgttttttatgttaaagtgaaaaaaacagatgttgggaggtacagtgatagttgtagatagaaaagaagagaaaaaagttgctgttactttaagacttacaacagaagaaaatgagatattaaatagaatcaaagaaaaatataatattagcaaatcagatgcaaccggtattctaataaaaaaatatgcaaaggaggaatacggtgcattttaaacaaaaaaagatagacagcactggcatgctgcctatctatgactaaattttgttaagtgtattagcaccgttattatatcatgagcgaaaatgtaataaaagaaactgaaaacaagaaaaattcaagaggacgtaattggacatttgttttatatccagaatcagcaaaagccgagtggttagagtatttaaaagagttacacattcaatttgtagtgtctccattacatgatagggatactgatacagaaggtaggatgaaaaaagagcattatcatattctagtgatgtatgagggtaataaatcttatgaacagataaaaataattacagaagaattgaatgcgactattccgcagattgcaggaagtgtgaaaggtcttgtgagatatatgcttcacatggacgatcctaataaatttaaatatcaaaaagaagatatgatagtttatggcggtgtagatgttgatgaattattaaagaaaacaacaacagatagatataaattaattaaagaaatgattgagtttattgatgaacaaggaatcgtagaatttaagagtttaatggattatgcaatgaagtttaaatttgatgattggttcccgcttttatgtgataactcggcgtatgttattcaagaatatataaaatcaaatcggtataaatctgaccgatagattttgaatttaggtgtcacaagacactcttttttcgcaccagcgaaaactggtttaagccgactgcgcaaaagacataatcgattcacaaaaaataggcacacgaaaaacaagttaagggatgcagtttatgcatcccttaacttacttattaaataatttatagctattgaaaagagataagaattgttcaaagctaatattgtttaaatcgtcaattcctgcatgttttaaggaattgttaaattgattttttgtaaatattttcttgtattctttgttaacccatttcataacgaaataattatacttttgtttatctttgtgtgatattcttgatttttttctacttaatctgataagtgagctattcactttaggtttaggatgaaaatattctcttggaaccatacttaatatagaaatatcaacttctgccattaaaagtaatgccaatgagcgttttgtatttaataatcttttagcaaacccgtattccacgattaaataaatctcattagctatactatcaaaaacaattttgcgtattatatccgtacttatgttataaggtatattaccatatattttataggattggtttttaggaaatttaaactgcaatatatccttgtttaaaacttggaaattatcgtgatcaacaagtttattttctgtagttttgcataatttatggtctatttcaatggcagttacgaaattacacctctttactaattcaagggtaaaatggccttttcctgagccgatttcaaagatattatcatgttcatttaatcttatatttgtcattattttatctatattatgttttgaagtaataaagttttgactgtgttttatatttttctcgttcattataaccctctttaatttggttatatgaattttgcttattaacgattcattataaccacttattttttgtttggttgataatgaactgtgctgattacaaaaatactaaaaatgcccatattttttcctccttataaaattagtataattatagcacgagctctgataaatatgaacatgatgagtgatcgttaaatttatactgcaatcggatgcgattattgaataaaagatatgagagatttatctaatttcttttttcttgtaaaaaaagaaagttcttaaaggttttatagttttggtcgtagagcacacggtttaacgacttaattacgaagtaaataagtctagtgtgttagactttatgaaatctatatacgtttatatatatttattatccggaggtgtagcatgtctcattcaattttgagggttgccagagttaaaggatcaagtaatacaaacgggatacaaagacataatcaaagagagaataaaaactataataataaagacataaatcatgaggaaacatataaaaattatgatttgattaacgcacaaaatataaagtataaagataaaattgatgaaacgattgatgagaattattcagggaaacgtaaaattcggtcagatgcaattcgacatgtggacggactggttacaagtgataaagatttctttgatgatttaagcggagaagaaatagaacgattttttaaagatagcttggagttt

SEQ ID NO: 186 - DNA, 1632 bp, Fusarium solani
  source 1..1632: mol_type = genomic DNA
atctctttattgactttcaaatcaaccttctttcgttctttgctctccttgattatccttgtgactgactttcgagtgctggtcacttggctcattcgaaatgttgacttcttccttgttgactgccctcgcggctttggcttcatccgcccacgcctggctccctaccgataactctcataccggcctcaacaagcgtgacgtcaccctattcacgtaccctctgcagccagactcgaacaagagatggcttcccagcagcaacaagattcgaggtgtgaaccttggttcgctcttcgtttacgagccctggatcgatagtcaagagtgggccaacactggatgcgagggggagaagtccgagtttgactgtgtcatgaacaagggccaagaaagtgcagataatgcttttcaggagcactggaagcgcttcattacccaggaggaccttgatgagatggccagctacggcttgaacacaatccgagtccctctgggatattggctgaaggaggatcttgtggatgcctcggagcacttccccaaggtatgactatcagaaagtcagccagaatgtcactaacatcatcgagggagggctggactacctgactcagctctgcggatgggccagtgaccgaggcttctacattatccttgagtaggtaatatgtccaagatgatcgactcttctaacaccaagtagtcttcacggtgcccccggtgctcaggagcccaaccaaccattcaccggccaatacgctcccacagtcggattttataacgactacaattatggccgcgccgttgagtggctcgagtggatcactgacattatccatactaagaacgagtatcgcaacgtcggcatgctggagatcgtgaatgagcccctgaactgggacaaggcggttgactctctgcgaaacacctactatcccaatgcctacaaggtagccaaagttctccccttctgtgtgctcaggtgcttaccaagctaggccatccgcaaggccgaagacaacctcaaggttgccaccaacgaccgcctccacatccaaatgatgggctccctctggggcagcggcaaccccaccgagttcctcgacgacaaatccttcacggcatttgacgatcaccgctacctcaagtgggacacgagcgtcgaagtctcccagagcgcctacatccaaaagtcgtgccaggacgatcgcaacaccgatggacctaccatcgttggcgagtggagcatcgccgtgcctgataatgttgaacagacggatgcttggaagcctcagagtcaaaaggacttttatagcaagtggtttgctgctcaggttcatgcttatgagcagcatactcttggttgggtgttttggacttggaagaccaaccttggtgatgactaccgttggtcttacagaggtacgtgggtttaactattgacagggatctgatactaatgatttacagatgctgcgagggccggtgttatccccaaggacctcaactctctcccaagcgtctgctagacgactgccctagggctgagctagctttgagtcgacaacagctcctgtggagcatgtacatcatttctttcgctgtctgtcgttcatggatttgcctcgc

SEQ ID NO: 187 - DNA, 10009 bp, Alkalihalobacillus bogoriensis
  source 1..10009: mol_type = genomic DNA
gagtatcgccagtaaggggcgtttttgttttctggttgttttcttcatttcaggtttcgccctttccttgccaaatataagaaaaacggcgttccgataatcgcggtgacaatgccgaccggtgattcataaggaaatgcaatccatctggccagaacatctgcgtacaccagcaaaatggcaccgaacagtgccgaaaacggaagcacgtattgataatgttctccgatcagcttgcggacaatatgcgggacgagcagcccgacaaagccaatcggcccggcgacggctacggaagcgccggaaagaattaaaataatcaaactgatcagaatcctgatgccgttcatattttgtccaagcccttttgctgtttcgtctccgagaccgagaacagaaacagaaccggaaaatacgagggcaagcccgatgccaatgacagaaaaaggagcgatggttatgacgtcctgccagttgctgccgtcgattgcgcctgtcatccagtacagaacatcctcacctgactcatttaaaataatgatggcctgtgtcatagaggagaggaacaagtgcacggccattcctgacagcgccagcttgacaggcgtcattccgccggatgaggcaatcatatacacaatcgcgccgcctgctgccgcacccgcaaaagcgaatataacagatgaatagggcgatgccggcagaatgacgagagaagcaacaacaaaaagcgatgcacccgcattcacaccgaaaatttggggtgaagccagaggatttctggtcatagcctgcatcagcgcccctgctacagctaggctggcgccgacaaaaacgccgattaatgtgcggggaaggcgaagagtagagatgatgagctgttcctttgaaccgtcccatacaaaaagatatttcaatgaatctatgatgctgatgtctgaggctcctactgaaagattcagcccaagcccaaatataaaaataatcagtgcaatgataaacatcatcagtcttgatgatgagcgccgtttggctgaatgatacaacagtctcacttccttactgcgtctggttgcaaaaacgaagaagcaaggattcccctcgcttctcatttgtcctatttattatacacttttttaagcacatctttggcgcttgtttcactagacttgatgcctctgaatcttgtccaagtgtcacggtccgcatcatagacttgtccatttttcaccgctttgagatttttccagagcgggttcgttttccactcatctacaatggttttgccttcgttggctgagatgaacaaaatatcaggatcgattttgctcaattgctcaaggctgacctcttgataggcgttatctgacttcacagcgtgtgtaaagcctagcattttaaagatttctccgtcataggatgatgatgtatgaagctggaaggaatccgctcttgcaacgccgagaacgatgttgcggttttcatctttcggaagttcggcttttagatcgttgatgacttttttgtgctcggcaagcttttcttttccttcatcttctttatttaatgctttagcaatggtcgtaaagctgtcgatcgtttcgtcatatgtcgcttcacggctttttaattcaatcgtcggggcgatttttttcagctgtttataaatgtttttatggcgctcagcgtcagcgatgattaaatcaggcttcaaggaactgatgacctcaagattgggttcgctgcgtgtgcctacagatgtgtaatcaatggagctgccgacaagctttttaatcatatcttttttgttgtcatctgcgatgcccaccggcgtaatgccgagattgtgaacggcatccaagaatgaaagctcaagcacaaccacccgcttaggtgtgccgcttactgtcgtttttccttcttcgtcatggatcactctggaatccttagactcgcttttgccgcttccgttgttattctggcttgatgaacagccggatacaatgaggcaggcgagcaataaaacactcatgatggcaatcaacttgttagaataggtgcgcatgtcattcttccttttttcagatttagtaatgagaatcattatcacatgtaacactataatagcatggcttatcatgtcaatatttttttagtaaagaaagctgcgtttttactgctttctcatgaaagcatcatcagacacaaataagtggtatgcagcgttaccgtgtcttcgagacaaaaacgcatgggcgttggctttagaggtttcgaacatatcagcagtgacataaggaaggagagtgctgagataaccggacaatttcttttctatttcatctgttagtgcaaattcaatgtcgccgatattcatgataatcgagaaaacaaagtcgatatcgatatgaaaatgttcctcggcaaaaaccgcaagctcgtgaattcctggtgaacatccggcacgcttatggaaaatctgtttgactaaatcactcacaatccaagcattgtattgctgttctggtgaaaagtattgcattagacatacctcctgctcgtacggataaaggcagcgtttcatggtcgtgtgctccgtgcagcggcttctccttaattttgatttttctgaaaataggtcccgttcctatcactttaccatggacggaaaacaaatagctactaccattcctcctgtttttctcttcaatgttctggaatctgtttcaggtacagacgatcgggtatgaaagaaatatagaaaacatgaaggaggaatatcgacatgaaaccagttgtaaaagagtatacaaatgacgaacagctcatgaaagatgtagaggaattgcagaaaatgggtgttgcgaaagaggatgtatacgtcttagctcacgacgatgacagaacggaacgcctggctgacaacacgaacgccaacacgatcggagccaaagaaacaggtttcaagcacgcggtgggaaatatcttcaataaaaaaggagacgagctccgcaataaaattcacgaaatcggtttttctgaagatgaagccgctcaatttgaaaaacgcttagatgaaggaaaagtgcttctctttgtgacagataacgaaaaagtgaaagcttgggcataaagcaaggaaaaaaccaaaaggccaatgtcggccttttggtttttttgcggtctttgcggtgggattttgcagaatgccgcaataggatagcggaacattttcggttctgaatgtccctcaatttgctattatatttttgtgataaattggaataaaatctcacaaaatagaaaatgggggtacatagtggatgaaaaaagtgatgttagctacggctttgtttttaggattgactccagctggcgcgaacgcagctgatttaggccaccagacgttgggatccaatgatggctggggcgcgtactcgaccggcacgacaggcggatcaaaagcatcctcctcaaatgtgtataccgtcagcaacagaaaccagcttgtctcggcattagggaaggaaacgaacacaacgccaaaaatcatttatatcaagggaacgattgacatgaacgtggatgacaatctgaagccgcttggcctaaatgactataaagatccggagtatgatttggacaaatatttgaaagcctatgatcctagcacatggggcaaaaaagagccgtcgggaacacaagaagaagcgagagcacgctctcagaaaaaccaaaaagcacgggtcatggtggatatccctgcaaacacgacgatcgtcggttcagggactaacgctaaagtcgtgggaggaaacttccaaatcaagagtgataacgtcattattcgcaacattgaattccaggatgcctatgactattttccgcaatggttgtaaaacgacggccagtgaattctgatcaaatggttcagtgagagcgaagcgaacacttgattttttaattttctatcttttataggtcattagagtatacttatttgtcctataaactatttagcagcataatagatttattgaataggtcatttaagttgagcatattagaggaggaaaatcttggagaaatatttgaagaacccgaggatctagatcaggtaccgcaacgttcgcagatgctgctgaagagattattaaaaagctgaaagcaaaaggctatcaattggtaactgtatctcagcttgaagaagtgaagaagcagagaggctattgaataaatgagtagaaagcgccatatcggcgcttttcttttggaagaaaatatagggaaaatggtacttgttaaaaattcggaatatttatacaatatcatatgtatcacattgaaaggaggggcctgctgtccagactgtccgctgtgtaaaaaaaaggaataaaggggggttgacattattttactgatatgtataatataatttgtataagaaaatggaggggccctcgaaacgtaagatgaaaccttagataaaagtgctttttttgttgcaattgaagaattattaatgttaagcttaattaaagataatatctttgaattgtaacgcccctcaaaagtaagaactacaaaaaaagaatacgttatatagaaatatgtttgaaccttcttcagattacaaatatattcggacggactctacctcaaatgcttatctaactatagaatgacatacaagcacaaccttgaaaatttgaaaatataactaccaatgaacttgttcatgtgaattatcgctgtatttaattttctcaattcaatatataatatgccaatacattgttacaagtagaaattaagacacccttgatagccttactatacctaacatgatgtagtattaaatgaatatgtaaatatatttatgataagaagcgacttatttataatcattacatatttttctattggaatgattaagattccaatagaatagtgtataaattatttatcttgaaaggagggatgcctaaaaacgaagaacattaaaaacatatatttgcaccgtctaatggatttatgaaaaatcattttatcagtttgaaaattatgtattatggagctctgaaaaaaaggagaggataaagaatgaaacaacaaaaacggctttacgcccgattgctgacgctgttatttgcgctcatcttcttgctgcctcattctgcagccgcggcaaattccggattttatgtaagcggtaccactctatacgatgccaatggaaacccatttgtaatgagagggattaaccatgggcacacatggtataaagaccaggcaactactgcaattgaagggattgcaaataccggtgctaatacggtccggattgtgttatctgatgggggacaatggacaaaagatgacatccatacagtaagaaaccttatctctttagcggaagataatcatttggttgctgttcttgaagttcatgatgctaccggtcaagatgatattgcttcgctcaatcgtgctgttgattattggattgaaatgagaagtgctttaattggaaaggaaaaaaccgtcattattaatattgcgaatgaatggtttggttcgtgggaaggggatccatgggctagagggtataaacaagcaatcccgcgattgcgtaacgccggtctaaaccataccttgatggtagatgctgcggggtggggacaatttccacaatcgattcatgattatggaagagaagtttttaatgctgaccctcaacgaaatacaatgttttcgattcatatgtatgaatatgcaggtggtacagcaagacaagttcgtactaatattgacggagttcttaatcaagacctcgcattagtcattggtgaatttggacaccgtcatacaaatggtgacgtcgatgaagcaacgattatgagctattctgaacaaagaggagttgggtggttggcgtggtcatggaaagggaacggcccagaatttgagtatttagacctttcgaatgattgggctggaaataaccttacagcttggggaaatacaatagtgcatggtccatatggtattagagaaacttcgagaccagttaccgtttttacaggtggaggatctgatggaggaacttctccgtaatcgcatgttcaatccgctccataatcggtcgacgcggcggttcgcgtccggacagcacatcaccgaaatatttcgacggcccagccggctagcgcgttaatccgcggatatatagcggccgcagatctgggaccaataataatgactagagaagaaagaatgaagattgttcatgaaattaaggaacgaatattggataaagtgggatatttttaaaatatatatttatgttacagtaatattgacttttaaaaaaggattgattctaatgaagaaagcagacaagtaagcctcctaaattcactttagataaaaatttaggaggcatatcaaatgaactttaataaaattgatttagacaattggaagagaaaagagatatttaatcattatttgaaccaacaaacgacttttagtataaccacagaaattgatattagtgttttataccgaaacataaaacaagaaggatataaattttaccctgcatttattttcttagtgacaagggtgataaactcaaatacagcttttagaactggttacaatagcgacggagagttaggttattgggataagttagagccactttatacaatttttgatggtgtatctaaaacattctctggtatttggactcctgtaaagaatgacttcaaagagttttatgatttatacctttctgatgtagagaaatataatggttcggggaaattgtttcccaaaacacctatacctgaaaatgctttttctctttctattattccatggacttcatttactgggtttaacttaaatatcaataataatagtaattaccttctacccattattacagcaggaaaattcattaataaaggtaattcaatatatttaccgctatctttacaggtacatcattctgtttgtgatggttatcatgcaggattgtttatgaactctattcaggaattgtcagataggcctaatgactggcttttatatgagataatgccgactgtactttttacagtcggttttctaacgatacattaataggtacgaaaaagcaactttttttgcgcttaaaaccagtcataccaataacttaagggtaactagcctcgccggaaagagcgaaaatgcctcacatttgtgccacctaaaaaggagcgatttacatatgagttatgcagtttgtagaatgcaaaaagtgaaatcagctggactaaaaggggccgcagagtagaatggaaaaggggatcggaaaacaagtatataggaggagacctatttatggcttcagaaaaagacgcaggaaaacagtcagcagtaaagcttgttccattgcttattactgtcgctgtgggactaatcatctggtttattcccgctccgtccggacttgaacctaaagcttggcatttgtttgcgatttttgtcgcaacaattatcggctttatctccaagcccttgccaatgggtgcaattgcaatttttgcattggcggttactgcactaactggaacactatcaattgaggatacattaagcggattcgggaataagaccatttggcttatcgttatcgcattctttatttcccggggatttatcaaaaccggtctcggtgcgagaatttcgtatgtattcgttcagaaattcggaaaaaaaacccttggactttcttattcactgctattcagtgatttaatactttcacctgctattccaagtaatacggcgcgtgcaggaggcattatatttcctattatcagatcattatccgaaacattcggatcaagcccggcaaatggaacagagagaaaaatcggtgcattcttattaaaaaccggttttcaggggaatctgatcacatctgctatgttcctgacagcgatggcggcgaacccgctgattgccaagctggcccatgatgtcgcaggggtggacttaacatggacaagctgggcaattgccgcgattgtaccgggacttgtaagcttaatcatcacgccgcttgtgatttacaaactgtatccgccggaaatcaaagaaacaccggatgcggcgaaaatcgcaacagaaaaactgaaagaaatgggaccgttcaaaaaatcggagctttccatggttatcgtgtttcttttggtgcttgtgctgtggatttttggcggcagcttcaacatcgacgctaccacaaccgcattgatcggtttggccgttctcttattatcacaagttctgacttgggatgatatcaagaaagaacagggcgcttgggatacgctcacttggtttgcggcgcttgtcatgctcgccaacttcttgaatgaattaggcatggtgtcttggttcagtaatgccatgaaatcatccgtatcagggttctcttggattgtggcattcatcattttaattgttgtgtattattactctcactatttctttgcaagtgcgacagcccacatcagtgcgatgtattcagcatttttggctgtcgtcgtggcagcgggcgcaccgccgcttttagcagcgctgagcctcgcgttcatcagcaacctgttcgggtcaacgactcactacggttctggagcggctccggtcttcttcggagcaggctacatcccgcaaggcaaatggtggtccatcggatttatcctgtcgattgttcatatcatcgtatggcttgtgatcggcggattatggtggaaagtactaggaatatggtagaaagaaaaaggcagacgcggtctgcctttttttattttcactccttcgtaagaaaatggattttgaaaaatgagaaaattccctgtgaaaaatggtatgatctaggtagaaaggacggctggtgctgtggtgaaaaagcggttccatttttccctgcaaacaaaaataatggggctgattgcggctctgctggtctttgtcattggtgtgctgaccattacgttagccgttcagcatacacagggagaacggagacaggcagagcagctggcggttcaaacggcgagaaccatttcctatatgccgccggttaaagagctcattgagagaaaagacggacatgcggctcagacgcaagaggtcattgaacaaatgaaagaacagactggtgcgtttgccatttatgttttgaacgaaaaaggagacattcgcagcgcctctggaaaaagcggattaaagaaactggagcgcagcagagaaattttgtttggcggttcgcatgtttctgaaacaaaagcggatggacgaagagtgatcagagggagcgcgccgattataaaagaacagaagggatacagccaagtgatcggcagcgtgtctgttgattttctgcaaacggagacagagcaaagcatcaaaaagcatttgagaaatttgagtgtgattgctgtgcttgtactgctgctcggatttattggcgccgccgtgctggcgaaaagcatcagaaaggatacgctcgggcttgaaccgcatgagatcgcggctctatatcgtgagaggaacgcaatgcttttcgcgattcgagaagggattattgccaccaatcgtgaaggcgtcgtcaccatgatgaacgtatcggcggccgagatgctgaagctgcccgagcctgtgatccatcttcctatagatgacgtcatgccgggagcagggctgatgtctgtgcttgaaaaaggagaaatgctgccgaaccaggaagtaagcgtcaacgatcaagtgtttattatcaatacgaaagtgatgaatcaaggcgggcaggcgtatgggattgtcgtcagcttcagggagaaaacagagctgaagaagctgatcgacacattgacagaggttcgcaaatattcagaggatctcagggcgcagactcatgaattttcaaataagctttatgcgattttagggctgc

SEQ ID NO: 188 - DNA, 8344 bp, Evansstolkia leycettana
  source 1..8344: mol_type = genomic DNA
gcggccgcccgtaatgcggtatcgtgaaagcgaaaaaaaaactaacagtagataagacagatagacagatagagatggacgagaaacagggggggagaaaaggggaaaagagaaggaaagaaagactcatctatcgcagataagacaatcaaccctcatggcgcctccaaccaccatccgcactagggaccaagcgctcgcaccgttagcaacgcttgactcacaaaccaactgccggctgaaagagcttgtgcaatgggagtgccaattcaaaggagccgaatacgtctgctcgccttttaagaggctttttgaacactgcattgcacccgacaaatcagccactaactacgaggtcacggacacatataccaatagttaaaaattacatatactctatatagcacagtagtgtgataaataaaaaattttgccaagacttttttaaactgcacccgacagatcaggtctgtgcctactatgcacttatgcccggggtcccgggaggagaaaaaacgagggctgggaaatgtccgtggactttaaacgctccgggttagcagagtagcagggctttcggctttggaaatttaggtgacttgttgaaaaagcaaaatttgggctcagtaatgccactgcagtggcttatcacgccaggactgcgggagtggcgggggcaaacacacccgcgataaagagcgcgatgaatataaaagggggccaatgttacgtcccgttatattggagttcttcccatacaaacttaagagtccaattagcttcatcgccaataaaaaaacaagctaacctaattctaacaagcaaagatgcttttgcaagccttccttttccttttggctggttttgcagccaagatctctgcacagcaaaccatgtggggtcaatgcggtggtcagggctggaccggacctaccatctgtgtagcaggcgcgacatgcagcacacagaacccttggtatgcgcagtgcaccccagcacctaccgcgccgacgaccttgcaaacaacaactacgacgagctcgaaatcgtccacgaccacgagctcgaagtcgtccacgaccacaggtggaagtggcggtggaactacgacctcaacgtcagccaccatcaccgcggctccatctggtaacccatactccggataccagctctatgtgaaccaggaatactcgtccgaggtgtacgcgtctgctattccttcccttaccggcactctggtcgcgaaggcaagcgccgcggcagaggtgccatctttcctgtggctggacactgcctccaaggtgccactgatgggcacttacttgcaggatatccaggcgaagaacgctgctggcgccaacccaccatatgccggtcaattcgtggtttacgacttgccggatcgtgattgcgctgcattggccagcaatggagagtactccattgctaacaatggtgttgccaactacaaggcttacatcgactccatccgcgcgcttcttgttcaatactcgaacgtccatgtcatccttgtgatcgagcccgacagcttggccaaccttgtcaccaacctgaatgttcagaagtgtgctaatgctcagagtgcttacgtggagtgcatcaactatgccctcactcagttgaacctcaagaacgttgctatgtacatcgatgctggtcatgctggatggctcggctggcccgccaaccttagcccggccgctcaactctttgcttccgtgtaccagaatgcaagctccccagctgccgttcgcggcctggcaaccaacgtggccaactataatgcctggtcgatcgccacttgcccatcttacacccaaggcgaccccaactgcgacgagcagaaatacatcaacgctctggctccattgcttcagcaacagggatggtcatcagttcactttatcaccgataccggccgtaacggtgtccagcctaccaagcagaatgcctggggtgactggtgcaacgttatcggaaccggcttcggtgtccgtcccaccaccaacactggcgatccattggaggatgctttcgtctgggtcaagcctggtggtgagagtgatggtacttccaactccacttcgcctcgctacgacgcccactgcggttacagtgatgctcttcagcctgctcctgaggctggtacctggttcgaggcttactttgagcaactccttaccaacgccaacccctctttctaaagcttaattaatatgatttatgatttttattattaaataagttataaaaaaaataagtgtatacaaattttaaagtgactcttaggttttaaaacgaaaattcttattcttgagtaactctttcctgtaggtcaggttgctttctcaggtatagcatgaggtcgctcttattgaccacacctctaccggcatgccgagcaaatgcctgcaaatcgctccccatttcacccaattgtagatatgctaactccagcaatgagttgatgaatctcggtgtgtattttatgtcctcagaggacaacacctgttgtaatcgttcttccacacggatcgcggccgctagtcgagtataggaaatgtttacattttcgtattgttttcgattcactctatgaatagttcttactacaatttttttgtctaaagagtaatactagagataaacataaaaaatgtagaggtcgagtttagatgcaagttcaaggagcgaaaggtggatgggtaggttatatagggatatagcacagagatatatagcaaagagatacttttgagcaatgtttgtggaagcggtattcgcaatattttagtagctcgttacagtccggtgcgtttttggttttttgaaagtgcgtcttcagagcgcttttggttttcaaaagcgctctgaagttcctatactttctagagaataggaacttcggaataggaacttcaaagcgtttccgaaaacgaggggatcagcttggcgtaatcatggtcatagctgtttcctgtgtgaaattgttatccgctcacaattccacacaacatacgagccggaagcataaagtgtaaagcctggggtgcctaatgagtgagctaactcacattaattgcgttgcgctcactgcccgctttccagtcgggaaacctgtcgtgccagctgcattaatgaatcggccaacgcgcggggagaggcggtttgcgtattggcgctcttccgcttcctcgctcactgactcgctgcgctcggtcgttcggctgcggcgagcggtatcagctcactcaaaggcggtaatacggttatccacagaatcaggggataacgcaggaaagaacatgtgagcaaaaggccagcaaaaggccaggaaccgtaaaaaggccgcgttgctggcgtttttccataggctccgcccccctgacgagcatcacaaaaatcgacgctcaagtcagaggtggcgaaacccgacaggactataaagataccaggcgtttccccctggaagctccctcgtgcgctctcctgttccgaccctgccgcttaccggatacctgtccgcctttctcccttcgggaagcgtggcgctttctcaatgctcacgctgtaggtatctcagttcggtgtaggtcgttcgctccaagctgggctgtgtgcacgaaccccccgttcagcccgaccgctgcgccttatccggtaactatcgtcttgagtccaacccggtaagacacgacttatcgccactggcagcagccactggtaacaggattagcagagcgaggtatgtaggcggtgctacagagttcttgaagtggtggcctaactacggctacactagaaggacagtatttggtatctgcgctctgctgaagccagttaccttcggaaaaagagttggtagctcttgatccggcaaacaaaccaccgctggtagcggtggtttttttgtttgcaagcagcagattacgcgcagaaaaaaaggatctcaagaagatcctttgatcttttctacggggtctgacgctcagtggaacgaaaactcacgttaagggattttggtcatgagattatcaaaaaggatcttcacctagatccttttaaattaaaaatgaagttttaaatcaatctaaagtatatatgagtaaacttggtctgacagttaccaatgcttaatcagtgaggcacctatctcagcgatctgtctatttcgttcatccatagttgcctgactccccgtcgtgtagataactacgatacgggagggcttaccatctggccccagtgctgcaatgataccgcgagacccacgctcaccggctccagatttatcagcaataaaccagccagccggaagggccgagcgcagaagtggtcctgcaactttatccgcctccatccagtctattaattgttgccgggaagctagagtaagtagttcgccagttaatagtttgcgcaacgttgttgccattgctacaggcatcgtggtgtcacgctcgtcgtttggtatggcttcattcagctccggttcccaacgatcaaggcgagttacatgatcccccatgttgtgcaaaaaagcggttagctccttcggtcctccgatcgttgtcagaagtaagttggccgcagtgttatcactcatggttatggcagcactgcataattctcttactgtcatgccatccgtaagatgcttttctgtgactggtgagtactcaaccaagtcattctgagaatagtgtatgcggcgaccgagttgctcttgcccggcgtcaatacgggataataccgcgccacatagcagaactttaaaagtgctcatcattggaaaacgttcttcggggcgaaaactctcaaggatcttaccgctgttgagatccagttcgatgtaacccactcgtgcacccaactgatcttcagcatcttttactttcaccagcgtttctgggtgagcaaaaacaggaaggcaaaatgccgcaaaaaagggaataagggcgacacggaaatgttgaatactcatactcttcctttttcaatattattgaagcatttatcagggttattgtctcatgagcggatacatatttgaatgtatttagaaaaataaacaaataggggttccgcgcacatttccccgaaaagtgccacctgacgtctaagaaaccattattatcatgacattaacctataaaaataggcgtatcacgaggccctttcgtcttcaagaatcgcgcgtttcggtgatgacggtgaaaacctctgacacatgcagctcccggagacggtcacagcttgtctgtaagcggatgccgggagcagacaagcccgtcagggcgcgtcagcgggtgttggcgggtgtcggggctggcttaactatgcggcatcagagcagattgtactgagagtgcaccatatgcggtgtgaaataccgcacagatgcgtaaggagaaaataccgcatcaggcgccattcgccattcaggctgcgcaactgttgggaagggcgatcggtgcgggcctcttcgctattacgccagctggcgaaggggggatgtgctgcaaggcgattaagttgggtaacgccagggttttcccagtcacgacgttgtaaaacgacggccagggccagtgaattccctctgaagttcctatactttctagaataggaacttcggaataggaacttcaaagcgtttccgaaaacgagcgcttccgaaaatgcaacgcgagctgcgcacatacagctcactgttcacgtcgcacctatatctgcgtgttgcctgtatatatatatacatgagaagaacggcatagtgcgtgtttatgcttaaatgcgtacttatatgcgtctatttatgtaggatgaaaggtagtctagtacctcctgtgatattatcccattccatgcggggtatcgtatgcttccttcagcactaccctttagctgttctatatgctgccactcctcaattggattagtctcatccttcaatgctatcatttcctttgatattggatcatatgcatcccgagagcgctatttttctaacaaagcatcttagattactttttttctcctttgtgcgctctataatgcagtctcttgataactttttgcactgtaggtccgttaaggttagaagaaggctactttggtgtctattttctcttccataaaaaaagcctgactccacttcccgcgtttactgattactagcgaagctgcgggtgcattttttcaagataaaggcatccccgattatattctataccgatgtggattgcgcatactttgtgaacagaaagtgatagcgttgatgattcttcattggtcagaaaattatgaacggtttcttctattttgtctctatatactacaactgtgggaatactcaggtatcgtaagatgcaagagttcgaatctcttagcaaccattatttttttcctcaacataacgagaacacacaggggcgctatcgcacagaatcaaattcgatgactggaaattttttgttaatttcagaggtcgcctgacgcatatacctttttcaactgaaaaattgggagaaaaaggaaaggtgagaggccggaaccggcttttcatatagaatagagaagcgttcatgactaaatgcttgcatcacaatacttgaagttgacaatattatttaaggacctattgttttttccaataggtggttagcaatcgtcttactttctaacttttcttaccttttacatttcagcaatatatatatatatttcaaggatataccattctaatgtctgcccctatgtctgcccctaagaagatcgtcgttttgccaggtgaccacgttggtcaagaaatcacagccgaagccattaaggttcttaaagctatttctgatgttcgttccaatgtcaagttcgatttcgaaaatcatttaattggtggtgctgctatcgatgctacaggtgtcccacttccagatgaggcgctggaagcctccaagaaggttgatgccgttttgttaggtgctgtgggtggtcctaaatggggtaccggtagtgttagacctgaacaaggtttactaaaaatccgtaaagaacttcaattgtacgccaacttaagaccatgtaactttgcatccgactctcttttagacttatctccaatcaagccacaatttgctaaaggtactgacttcgttgttgtcagagaattagtgggaggtatttactttggtaagagaaaggaagacgatggtgatggtgtcgcttgggatagtgaacaatacaccgttccagaagtgcaaagaatcacaagaatggccgctttcatggccctacaacatgagccaccattgcctatttggtccttggataaagctaatgttttggcctcttcaagattatggagaaaaactgtggaggaaaccatcaagaacgaattccctacattgaaggttcaacatcaattgattgattctgccgccatgatcctagttaagaacccaacccacctaaatggtattataatcaccagcaacatgtttggtgatatcatctccgatgaagcctccgttatcccaggttccttgggtttgttgccatctgcgtccttggcctctttgccagacaagaacaccgcatttggtttgtacgaaccatgccacggttctgctccagatttgccaaagaataaggttgaccctatcgccactatcttgtctgctgcaatgatgttgaaattgtcattgaacttgcctgaagaaggtaaggccattgaagatgcagttaaaaaggttttggatgcaggtatcagaactggtgatttaggtggttccaacagtaccaccgaagtcggtgatgctgtcgccgaagaagttaagaaaatccttgcttaaaaagattctctttttttatgatatttgtacataaactttataaatgaaattcataatagaaacgacacgaaattacaaaatggaatatgttcatagggtagacgaaactatatacgcaatctacatacatttatcaagaaggagaaaaaggaggatagtaaaggaatacaggtaagcaaattgatactaatggctcaacgtgataaggaaaaagaattgcactttaacattaatattgacaaggaggagggcaccacacaaaaagttaggtgtaacagaaaatcatgaaactacgattcctaatttgatattggaggattttctctaaaaaaaaaaaaatacaacaaataaaaaacactcaatgacctgaccatttgatggagtttaagtcaataccttcttgaaccatttcccataatggtgaaagttccctcaagaattttactctgtcagaaacggccttacgacgt

SEQ ID NO: 189 - DNA, 1489 bp, Humicola insolens
  source 1..1489: mol_type = genomic DNA
aacgacgacgacgactacaacgaacaacatcatcctcgaacatcacaaacctatgcattccggccggtccgacgagtaataatacaccacgaggaacatgatgctccccaagccagcggcgctccttcgcgccatgctgcttgcggccatcgccgccgatgcccagtccgacaagctccaagtcgacctcaactctccaggtgcgtctttgacacggtagttcgcctccgttgcttcgaggataattctcgctgacccaagcgcctctgcatctccagcctcgatcaagaaagccgcaaaactggtcgctgccaacctcatgtcccactaccatggcgacgaacccggtgctactcctggtatcctcccaggcccgcctcctgctggtccatactactggtggcaagccggtgctatgtgggggaccatagtcgactactggcactacacgggagacgaaacatacaacgccgaagcgctgcggtccatggtcttccaggctgaacctcccgccaacgcctacatgccccgcaactggaccgcgtccctaggtaacgacgatcaaggtttctggggtatggccgccatgctcgccgccgagacgaacttcaccaacccaccagaagaccagcctcaatggctagcccttgcccaggccgtcttcaacacccaggtcccgcgttgggagatggactactgcaacggtggtctgcgatggcaaatcgtgcaggccaacaacggctacaactacaagaacaccatcgctgctgccgtcttcctcaacattgcttcccgtctggcccgatacaccggcaacgactcgtacgcggaatgggctgaaagggcttgggactggatggagggtgtcggatacatcaccgaggacttcaatgttaaggatggtgcccacgtcgaatccaactgcaccgacatcaaccccgtccagttctctgccaacgctgccatcctgatccacggcgtttccgtcatgtacaactacgtatgttcactacctgcttgacttgctccattatctcccgacctattccttgctaacccaactcagacatccgggagcgcccgcgataaatggcgttaccgcgtcgttggccttgtcaaccgcaccctcgaacactttttccccgacggcatcatggtcgaacgcccctgcgaactcgaagaccgcatgcaatgcaacacagaccagcactccttcaaagggtacatgcaccgcgccctcgccacagccgccgtcgtcgcccccttcatgcgcgataccatcgtccccgtcctccgctcttccaccgaaggctgcgtctcctcctgcctcgccgacggaacctgcggtttccgttggaacattggccgctacgacggcgacgtcgaccacggtcccgccggtcagcagatgagcgccctcgccgcgctgtcgaccttgctgatcgatcaggatcgggttctgcgcgggccgttgacgaacgcgaccggc

SEQ ID NO: 190 - DNA, 1117 bp, Diaporthe sojae
  source 1..1117: mol_type = genomic DNA
ccttataattgtcaatcactcgtttcccacgcctctgccctcccacagcttacctactataccaggcagaacgtctgatcctacatattggtgcctcaagatgcacctccgctcgttttattctgctgtattagcagcagccacagcttccgcaaccaagatcctgctgcccttgtacatctatccaataccactggatagatggggcagcatctacgacgctattgcaacacatccgtccatcgacttccagatcgtcataaacccaagctctgggcccggcgggtcaactccaggatataacaaccactggatctcagccgtctccaaacttcatgcctacgacaacgtagacacgttgggctatgtgcgtgtcggctatggggccaaggccttgaacgacattaccacggacatcacgaactggaatggatggaatcactacacggcagcagacatcaccattgatggcatcttcttcgacgagacccgtatgtaccacttttctccttttacggatccccgtctttcatgctttggaatgttctagaatgcaacactttaggacccgtagcaggactaacgtcaccactagccaattggcaaggcacaaagggtgcgaacgacgtctctttcatgcagcagctcgctgagctggcagaccacggtgggtatagcaaggtcttcaatctcgggcaggcctccaatcacgatgagtacttcagcattgccgacacggtcgtcatctttgagaacacggccgagtggtacaacgacaccgtgctggccacggccgcagcagacggcgtcgcagacaagtccgccgtgctcatccaccacttcgcaacaagcgggttgacttcggggtttgcggttagatgggttgtggacatggttcgcaagggtctcggaagttttgccatcatcaattccgactggaacaatgcaaactcgaatgtggcgccgatggggattgggatactggctgacatgctcgagtcggttcagggttattgactttaggaccaatgtgtcttgttctcatgagacagagaatctctcgagggttcacctattatattatgctccctacatctgtagcctccagaaagccaaa

SEQ ID NO: 191 - DNA, 1201 bp, unidentified
  source 1..1201: mol_type = genomic DNA
gggttgggcttcctttttgttcttccgggctccacgtgaatatcatccgcaccgtatcaagccaacatgatctccgtctctacccttgctctggcccttctggccgccgcccaggccgtcgagtccgcctcggccggttgtggcaagaaccccccgacgtcgggcaccaagtccatcaacgtcaacggcaagcagcgccaatacattctccaactccccaacaactatgactccagcaaagcccaccgtgttgtctttggataccactggcgtgatgggtccatgaacgacgtggcaaacggcggcttctacggcttgcgctccctgtccggcgacagcaccatcttcatcgcccccaacggcctgaacgctggttgggccaacaacggcggcgaggacatcaccttcaccgaccagctcgtggccatgctcaagaacgacctctgcgtcaacgagggcgagttctttgccacaggttggagctacggcggatccatgagccacagcgtggcctgctcccggccgggtaggttcaccgtccccctcaaacaacaacccccgaccaaccaaacctgctaaccacaccccatagacgtcttcagcgccgtttccgtcatcgccggcgcccagctctcgggctgctccggcggcaccacgcccgtgccctacctcggcatccacggcgcggccgacaacgtgctgcccatctccatgggccagcagctgcgcgacaagtggctgcaaaccaacggttgcacctccaagaacgcgcccaacccgggcgcgggccaacagaaccacatcaagacgacgtacagctgctccaaggcgcccgtcacctggatcggccacggcggcggccacgtgcccgacccgaccggcaccaacggcgtcaagttcgcccccggcgagacctgggacttcttcaacgccgccgtcggcaccggcggcggcaccaaccccggcaccccgactaccaccaaccccggcacccagcccacctccaaccccggcaccaactgctcggccaagtgggggcagtgcggtggtcagggctgggctggcgccacgtgctgcgagagtggcagcacatgccgcgcttcgaatcagtggtactcgcagtgcatctaagagagggaagctggggataagaaagtgaggcttaggggttggtttgaagtttcgtgtgcatagttatttt

SEQ ID NO: 192 - DNA, 1968 bp, Trichoderma atroviride
  source 1..1968: mol_type = genomic DNA
atgtggtgcgtaggatctagagcttacctacgtacctcgatataggctctttaacagatgagaatagtgcagctgctgcaaatgatacgaaaaacaacctgacttcttctgcgaaacaccctcatataatgctcttttgggaatgtactgacacattttttctcgaatcatcagagccttcctttctggtataccccccatactcaatatttacgcaaggataggcgatttcagaatttccaaatcaacacagaggaacaaccttcctattaaagcttaatttagggtgtgatatagagttgtggggacttgcagcaagtgctactgtttgtaactctaatcggggtttaacaacaacccctaaccttgcagtctcgtatttcttcgtaggttatcatgctatataataggggactactctctccgcgagcagctaatcgtaggttgaggcgcctttctaccatacactgctttcagcgttattccaaacacaaaatatcatgcgctcttcaattctcttcgctgctgccacagctggcactggctctctggcctacacaattcccgccaacctccaagcaatctataatgctcacaaggtcagcgctttgcccaagtttcagtcctgagcaccactaatatgaattctcccccaacaggcaggaacttgcgccactccgctctcagggacatcctcttcaggagctgtattctgtggagacatcccaaatgctatattcttgaaagggagcaatggaaactatgacaacatggacgtcgattgcgatggctccgacgataaggctggcgactgctcaaatgatcctactggatatggcgagacagcgttcaaggatactgtgcagtcttacggtatttccgatttgaatgccaatatccatccatatgtcgttttcaatgagccaccttttttcaatgccgagcaacatggcatgaagccgctgagtgtcatggctgttgtttgcaacaaccaagtggtgagttatgcccttgtgatttttattccattgtgcgcgtctacggtgtatgcttacaagttttattctcctcttagtggtatggtatctggggcgataccaacacagagccgactacaggcgaagcagctatttcacttgcacagttgtgcttccccaacgagggtctgaatggcgactttggccacggcaccaaggatgtgctctacattggattcgttggcgatgaggccgtccctggcaagaacggtgccaactggaaagcgagcaatgtctcacagttcgaagccagtatcaagtcattgggcgattcactcgtccagagtcttggaacctcaagcggcggcggcggcggtggcggctctggcacctgctcctgggagggccactgcatcggggcctcttgcggaactgacgatgactgttcggatgactttgtctgcagcaacggcaagtgtgcggcagattaagaagtccgacgtggtcacgtctcgaaagtacattagtgactcagttcatatctgtagacagtgacacttgaaaccaaattaataatatgaaatacagagcatttgcttgtctatgcgcctcgtacgcggggtcaagaatccttagaacatgggatattttggcgaaaatacacgtattgattgactaatccatgctggcctctttggtgagtcactggcctttacatattaccgatggacctgggaaattcagcgacacgaggggctcagccaccaataggtaaccgagcactttgctgcagtacaccagggcttggggaagaggggagcaggaatggcgaggcagtattacatgcatgtagattaggtagtagtctgctggaatctctctgtggcgtcggagattaggcgtcagctagtagtaataggaacgtcggcacatcttgaatgacacatcatcccgatgatgcatgtacaggaacctcatcgtagcggcagaa

SEQ ID NO: 193 - DNA, 2253 bp, Parengyodontium album
  source 1..2253: mol_type = genomic DNA
atagtccggcaaagtccggctatcactgtagcactcaaccacgagattcgcagcactacgtgtgtagagaggcgcatggcagcacggctgcagaaccagaatccactcaactgaagaactacgagtaacgctgacttggttcaaaagttatcccaccacttacggcgaaccacaggagacgtgcctactagggctgctgtattgggaagctagatgggtcttggcgtaagatttagaactccacataggcaaccatcgagccatgcttacaagggtacgattagtcgaatggcgatgagccgggggctcgcattgccgggagatcgcatagccagaagggactgcccggttccattgacctgagctccgtagcatggcggagcagtaagaccttcaccttgataaatggagtataaagaggaggctgacgcccagatataaactagtccgctagccttattggaaaccaattgcaatactgataggaacatctcgtcgccatggctcgtctccgcaactcaatcctcctttcccttgctgctgcggcatcatctgcccgcgaaattcccagcaatgttcgcgacttttacgacagcgtccgcaatcagggccagtgctacaacaagctcaagtccggcttccacagcatccagggcgacagtggcggtaaataaattgctctcctactccatcctgagttgaatcctgacgagcagagtgaacagcgttttcctactgcggcgatcacatgaatgactacaacgtcatctaccttcagggcaataaccgcgagcttgccaacatggacattgactgtgacggtatccaaaacggtcccgctgatgacggccgctgcggcagctccggcgatactcagtctattacttcctttcagtatattgtcgagagttacggaacaggccagcgtgatctcgatgccaatgtccacccgtacgtcgtctttggcaacgagggcagcaaacctggctacgcaacattcaacccggaaaactatggcattgagcctctctctgtcatggcagtggtatgcaacaacaagctggtaagtcaacttctaacctgcttcactacaaggaccactttgctaaacaatgcttcagatctacggtgtttggggtgatgagaacggcgacgatggccctcaagccatgattggcgaggcttccatttccctcgcaaccgcctgtttcggctatggcgtgaacggtaacgcgggctacgatggcaacgatgtgctttacattgctttccctggaagcgatgccgttccaggccgaagcgccaagtggagtgcccgcagctacgatgaatttgagagcagcatttccgcgcttggtgacagtctcatccagcgtattgggggtggtggcggcggcgaccctggcaaccctcccactacttgctcatggcctggtcactgtgaaggtacgtgattctgaagctttttgtcacgataggagatgatttgagactaaaatgcatactcccaggtgccagctgcggcgacgaaaacgactgctccgatgacctcgtttgcaagagcggcacatgtacttctcctaacgtaccaacctgctcctgggttggccactgtgaaggtaagtaatgagtttcaactctgaatacgtggaatagtggttctaattcagggaccttaggcgccagctgtggagacgagaatgactgctcggataacctggtctgcaaaaacggacaatgtgcttctccgtaaatgagagaggtgttggtgaagagccgcaccagtatctccaacccttgatgatgtatagtttaacttttttgttatgagcaatgtatatacaaccaagcagacaaattctctcttgctagtagtacgttgcgtataatattcgctgcttcatgttcctcccagactaaatcaatccgatgcgccaacgattttgatcctgccttctagcaccggcgtaatcaacctcgtccagtcaacgacgcacgaccctaagacggggtcgcatattttagactcgacacctgccttttcaacccatcgagcccagaacttgcgcatcagtagcaactcaacgtctatctgctgatccggttcggctccaacctctgcagagtcccgaaagtcgccagatgggcttccctctccaacagcctcgagttcttcgttatcgtcttcttcttcattgtaaggtggcttgtcatatcctagcctggcgctgatgaaagcctgccagctgttgc

SEQ ID NO: 194 - DNA, 2453 bp, Trichoderma harzianum
  source 1..2453: mol_type = genomic DNA
tcccttcccccgggaagccggatatcgcccaaaaagcatatcagagcaactggcttcttgccgccattagcaacgttgctagacttggcgagggtatgagatgcctgtaattgatatggcgctgaagctaatcatgactgccacctcgatttggttcgcgccgggacatgcctatccatgccagtcgacagccgctggacgttgagcacgaggcaggggtggcacgccttgagaaccatgagctttggggcataacgttgctattgattgcaagctgcagtatagcactattgaagaagcatgggttacatgttggtgccaaggatctgaaggggaagcttcataagtgagcatcatgcttatagagtacacacgtaggtaccttgaagctccacagccagatatataaacatcgttggttcccattcagcgcttcagaagaaagtttaatccaccattggaaagcttgaacaatctaccaacatcacaagcaattcaccatgttgagcttcctcggaaaatccgtagccttgctggctgcgctgcaggctactctcagctctgcaagccccctggccacagaagagcgctctgttgagaagagagccaacggatacgcaaactccgtctatttcaccaactggtcagtgaaatcaacgagcttccatagcttcactgctgactataagcaattaaaggggcatctacgaccgcaacttccagcctgccgatttggtggcatcagatgtcactcatgtcatctactccttcatgaacctccaggcagacggcacagtgtaagccagataaaccagatgggatatatctccaaaaagccgctttcataatgctaattttctttcagtatctctggcgatacctacgctgattacgagaagcactatgccgatgattgtacgttttcctctcatggctagatgctatgtatacatacttacactcacactagcttggaatgatgtcggcaccaatgcctacggctgtgtcaagcagctgttcaaggtcaagaaggccaaccgaggcctcaaggttctgctctccatcggtggctggacctggtccaccaacttcccttctgcagcaagcacggatgccaaccgaaagaactttgcgaaaactgccattacctttatgaaggattggggtttcgatggtattgatatcgactgggagtaccctgcagacgccacccaggcctccaacatgattcttctgctgaaggaagtccgatctcagctggatgcttatgctgcccagtatgcccctggctaccacttcctcctcaccattgccgccccagctggcaaggacaactactccaagctgcgcctggctgatcttggccaagtccttgactacatcaacctcatggcctacgactacgccggatccttcagccccctcaccggtcacgacgccaacctgtttaacaacccgtccaaccccaatgccacccccttcaacaccgattccgctgtcaaggattatatcaatggaggtgttcccgccaacaagattgttctcggcatgcccatctacggaagatcattccagaacaccgctggtattggccagacttacaatggtgttggaagtggaagctgggaggccggtatctgggattacaaggctcttcccaaggctggcgccaccgtccagtacgattctgtcgcaaagggctactacagctacaactccgccaccaaggagctcatctctttcgatacccccgacatgatcaacaccaaggttgcctacctcaagtctctcggcctgggaggtagcatgttctgggaggcctcagccgacaagaagggagctgactcgctgattggaacaagccacagagctcttggaggcctggacacaactcagaacctgctgagctaccccaactccaagtatgataacatcaagaatggtctgaactaagctgcctaatttcaggcgcttcttggacattgaagatgttgaggggggagatattcttggaggggcaaagttattaagtaaatagttgtttatataactgtacatagccgcattagatagatgtatgaatagtatctgaaattatgataaagacttataacaaaactacaactaacatagtaggaaaagtgtcaatttgctaagcttctctcggaccaaagacacagtaggatgcccaaatccgcatttggcggtcgacacgacagaagggttccattttgtaaattcctcgggactaattttgaacaagtctctggtttcttggcaagttctactatcaacactgctgtaccaatagatacagtccttggccgtggcaggcgtcatgctgtaattcggggagggccgatcttcatggtaaagaaagtcaagtgagtgaacaccaacagaggagagaaagatcaatggatatatgtgcctgtgaaagctgtatagcatgt

SEQ ID NO: 195 - DNA, 2650 bp, Penicillium vasconiae
  source 1..2650: mol_type = genomic DNA
tcatgacccaagggtgtgtgtcacgttcgaaacggatcatttagccgcccaactcccctcaccaaaagaggatagtctactatacacaacaggcaccacgatacctggggtcacactcgtcccagcacggaagacaggcttcttcacggggcgcctcccgagacatgggggagattaggtccccttgcaggacgtgacctcatttcgtctgcggcgttgcccgcaaaatctggggagcttcctccgtgtccgcggagtgtttctttagtctgttccctttttgtccatctatgaatctaacataccattgtgtagacggtggtacggaccgtcacgccgtggagttcaatccgaagtgtaagttgaaaggcttcgagatccacatctggaggaatataaaaaagccctatattcgatcaaagtccttcatcctcactcctctcaatcacacaaaatccttcaaaatcacattgatcatttgatctaaatcctctaacaaaatgaagggatcaatctcctatcaaatctacaaaggtgccctgctcctctcggcccttttgacgtctgtccaggcccagcaggtcggcactttgacgactgagacccatccatcgttgacctggtcccagtgtaccgccggcggtagctgctctaccgtgaccggcagtgtggttatcgattctaactggcgctgggttcactccaccagtggctcgaccaactgctataccggcaacacctgggacgccaccctctgccctgacgatgtgacctgcgcagccaactgtgctctggatggcgctagctactcgagcacctacggtgttaccaccagcggcaattccctgcgtctgaactttgtcactacggcttcgcagaagaacatcggttcccgtctgtacttgctggagaatgacaccacctaccagaagttcaacctgctgaaccaggagttcactttcgatgtggatgtgtccaaccttccctgtggtctcaacggtgccctctactttgtggacatggacgcagatggtggcatggccaaatactccaccaacaaggccggagccaagtatggaactggttactgcgacagtcaatgcccgcgggatctcaagttcatcgatggccaggccaacgtggaaggctggaccccctccaccaatgatcccaactccggcattggcaatcacggctcctgctgtgcggagatggatatctgggaggccaactcgatctccaatgccgtcactcctcatccttgcgacaccccctcgcaaaccatgtgcactggcgatgcctgcggtggaacctacagcacttcgcgctatgccggtacttgcgatcccgatggctgtgatttcaacccctaccgtatgggcgacacttctttctacggtcctggcttgaccgttgacaccaagtctcccttcaccgtggtgacccaattcatcaccaacgatggcacctcttcaggcaccctgtcagagatcaagcgcttctacgtccagaacggcaaggtcatcccccagccccagtctaccatcactggcgtcaccggtaactcgatcaccgataccttctgcaatgcgcaaaagaccgcattcggcgaccccaatgtcttcaccaagcacggtggcatggcaggcatgggtgccggtctcgctgatggtatggttctggtcatgagtctctgggatgaccatgcggccgatatgctctggctcgacagcacctaccctaccgacgccgacccgaccactcccggtgtcaagcgcggtacttgcgatatctcctctggcgacccaaccaccgtcgagtctacctaccccaacgcctacgtcatctactcgaacatcaagactggtcctctcaactcgacctttaccggcaccacctccggcaccaccagctcttctaccactaccactagcactactactactagcaagaccagctctaccactaccactactactagcaagaccagctctaccagctccacctcgactaccacctctactggctcgagcaccaccggtgctgcgcactgggcccagtgtggtggaattggctggactggcgccaccacctgtgtcagcccgtacacttgcaccaagcagaatgactattactcccagtgcctgtagaggatcttgaatgatcttcaaatttgggagaaaagtggtgccggagaggtagcgaatacgatggaggggcgaggcagcaaagaatgttgatcaaattgttcgctcgttgtactttcttgatcttacccttttgttttcttagtttttagtttcctttgtgctagaggatatgagaatacaatcgatttttgcttcatttcacccattcaaagcttgtacggtaaatctcccccgctcttcgcttaggcgccaggaggcgacagtcttaatttcggttgcttggcagattgtccactaccatcgtttagctcgtttattctacccttttcaatccttttctagagatcgagaacagaaaatgggaatttgagagttcgagcctataagatagaattcagagaatagaaccacaaaatgaaaatgcccctggcaatacccataccatctgaaagtttcttgatccctcttcaggcacactgcagttcttcatcaaattgttc

SEQ ID NO: 196 - DNA, 1897 bp, Evansstolkia leycettana
  source 1..1897: mol_type = genomic DNA
cgaggtacttctcgttgacctggcgataccattcctctctccctctcatcagctcaactccctcctcaagaaccatcagcagcagcagcagtaagaacccaactgccacaatggccagcctcttctctttcaagatgtacaaggccgctctggtcctctcctctctccttgcggccacccaggcccagcaggccggcaccctgaccaccgaaacccatccttctctgacctggcagcaatgctctgccggcggcagctgcaccactcagaacggcaaggtcgtcatcgacgccaactggcgctgggttcacagcaccagcggctcgaacaactgctacactggcaacacttgggatgctactctctgccctgacgacgtgacttgcgctgccaactgcgccctggacggcgctgactactcgggcacctacggtgtcaccaccagcggcaactctctgcgcctgaacttcgtcacccaggcgtcgcagaagaacgtcggctctcgtctctatctgatggagaatgacacaacctaccagatcttcaagttgctgaaccaggagttcacctttgacgttgatgtctccaaccttccctgcggtctcaacggtgctctctacctggttgccatggatgccgacggcggcatggccaagtacccaaccaacaaggctggtgcgaagtacggaaccggttactgcgactcccagtgccctcgcgacctgaagttcatcaacggtgaggccaatgttgagggatggcagccttcttccaatgaccccaactctggcattggcaaccacggctcttgctgtgctgagatggacatctgggaggccaacagcatctccaatgcagtcactcctcacccttgcgacaccccgggacaggtcatgtgcaccggcaacaactgtggtggcacttacagcactactcgctatgctggcacttgcgatcctgatggctgcgacttcaacccctaccgcatgggcaaccactccttctacggccccaaacagatcgtcgacaccagctccaagttcactgttgttactcagttcctcaccgatgatggcacctccaccggcaccctcagcgagatcaggcgcttctacgttcagaacggccaggtcatccccaactccgtgtccacgatcagcggcgtctccggcaactccatcaccaccgagttctgcacggcccagaagcaggctttcggcgacactgatgacttcagcaagcacggcggtctgtctggcatgtccgccgccctctcccagggtatggttctcgtcatgagcttgtgggacgaccacgccgccaacatgctctggcttgacagcacctacccgaccaacgccacctcttccacccccggtgccgcccgtggtacttgcgacatctcctccggtgtccccgccgatgttgagtccaacgaccccaacgcctacgtcgtctactccaacatcaaggtcggcccgatcggctctaccttcagcagctctggctctggctctagctccagctccagcaccaccaccaccaccaccgcttccccaaccacgaccacctccagcgcttccagcaccggcactggcgttgctcagcactggggtcagtgcggtggccagggatggaccggtccgaccacctgcgttagcccctacacctgccaggagctgaacccctactactaccagtgcctgtaagcggttgtccctaacggggaggactactgctactactactagtactactactactagacgggtttattagaggaagatccacagattagactagacaggggtcacgatagacgggtctggtttcgaggtgaatcggaaacggaaagaaaacaaagacaagagagggcggcagagttttccagttccat

SEQ ID NO: 197 - DNA, 9499 bp, Geobacillus stearothermophilus
  source 1..9499: mol_type = genomic DNA
gtgctcattattaatctgttcagcaatcgggcgcgattgctgaataaaagatacgagagacctctcttgtatcttttttattttgagtggttttgtccgttacactagaaaaccgaaagacaataaaaattttattcttgctgagtctggctttcggtaagctagacaaaacggacaaaataaaaattggcaagggtttaaaggtggagattttttgagtgatcttctcaaaaaatactacctgtcccttgctgatttttaaacgagcacgagagcaaaacccccctttgctgaggtggcagagggcaggtttttttgtttcttttttctcgtaaaaaaaagaaaggtcttaaaggttttatggttttggtcggcactgccgacagcctcgcagagcacacactttatgaatataaagtatagtgtgttatactttacttggaagtggttgccggaaagagcgaaaatgcctcacattaaagataatatctttgaattgtaacgcccctcaaaagtaagaactacaaaaaaagaatacgttatatagaaatatgtttgaaccttcttcagattacaaatatattcggacggactctacctcaaatgcttatctaactatagaatgacatacaagcacaaccttgaaaatttgaaaatataactaccaatgaacttgttcatgtgaattatcgctgtatttaattttctcaattcaatatataatatgccaatacattgttacaagtagaaattaagacacccttgatagccttactatacctaacatgatgtagtattaaatgaatatgtaaatatatttatgataagaagcgacttatttataatcattacatatttttctattggaatgattaagattccaatagaatagtgtataaattatttatcttgaaaggagggatgcctaaaaacgaagaacattaaaaacatatatttgcaccgtctaatggatttatgaaaaatcattttatcagtttgaaaattatgtattatggagctctgaaaaaaaggagaggataaagaatggcacctgagaagaaagttgagcaagttcgcaacgtagagaaaaactacggtcttcttacaccaggccttttccgcaaaatccaaaaacttaaccctaacgaggagatcagcactgtaatcgtttttgagaaccatcgcgagaaggagatcgctgttcgcgttcttgagcttatgggtgcgaaggtacgctacgtttaccatatcattccggctattgcggctgaccttaaggttcgcgaccttcttgttatctctggtcttactggtggcaaagcgaaactttcaggcgttcgcttcatccaagaggactacaaagttactgtatctgctgagcttgagggacttgacgagtcagcggcacaagtaatggcaacatacgtatggaaccttggctacgacggttctggcatcactatcggcatcatcgacacgggcatcgacgcttcacaccctgaccttcaaggtaaggtaatcggttgggttgacttcgttaatggtcgctcttatccgtatgacgaccatggccacggtacacacgtagcatctatcgcagctggcactggcgcagcttctaacggcaagtacaaaggcatggcacctggtgcgaaacttgctggtatcaaagtacttggcgcagacggctctggctcaatcagcacaatcatcaaaggcgttgagtgggctgttgacaacaaggacaaatacggtatcaaagttatcaacctttctcttggctcttctcaaagctctgacggcacagacgcgctttcacaagctgttaacgctgcttgggacgctggtcttgtagttgttgttgctgctggtaacagcggtccaaacaaatacactatcggctcaccggcagctgcgtctaaagtaatcacagttggagctgtagacaaatacgacgttatcacttctttctcatctcgtggccctactgcagatggtcgccttaaaccagaggttgtagcaccaggcaactggatcatcgcagctcgcgcttctggcacatcaatgggccaaccaatcaacgactactatactgctgcgccaggaacttctatggctactccacacgtagcaggtatcgctgcacttcttcttcaagctcacccttcttggacgcctgacaaagtaaagactgcacttatcgagactgctgacatcgttaaacctgacgagatcgcagacatcgcttatggtgctggtcgcgttaatgcgtacaaggctatcaactatgacaactatgctaaacttgtattcacgggctacgtagctaacaaaggctctcaaacgcaccaatttgttatctctggcgcaagcttcgttactgctactctttactgggacaacgctaactctgaccttgacctttacttatacgacccaaacggcaaccaggttgactattcttatactgcatactacgactttgagaaggttggctattacaaccctactgacggcacatggacaatcaaagtagtaagctattcaggatcagctaactaccaagtagacgtagtttctgacggttctcttagccagcctggctcattaccataaacgcgttaatcaataaaaaaacgctgtgcggttaaagggcacagcgtttttttgtgtatgcggccgcgtcgactagaagagcagagaggacggatttcctgaaggaaatccgtttttttattttgcccgtcttataaatttcgttgtccaactcgcttaattgcgagtttttatttcgtttatttcaattaaggtaactaaagatcctctagagtcgattatgtcttttgcgcagtcggcttaaaccagttttcgctggtgcgaaaaaagagtgtcttgtgacacctaaattcaaaatctatcggtcagatttataccgatttgattttatatattcttgaataacatacgccgagttatcacataaaagcgggaaccaatcatcaaatttaaacttcattgcataatccattaaactcttaaattctacgattccttgttcatcaataaactcaatcatttctttaattaatttatatctatctgttgttgttttctttaataattcatcaacatctacaccgccataaactatcatatcttctttttgatatttaaatttattaggatcgtccatgtgaagcatatatctcacaagacctttcacacttcctgcaatctgcggaatagtcgcattcaattcttctgtaattatttttatctgttcataagatttattaccctcatacatcactagaatatgataatgctcttttttcatcctaccttctgtatcagtatccctatcatgtaatggagacactacaaattgaatgtgtaactcttttaaatactctaaccactcggcttttgctgattctggatataaaacaaatgtccaattacgtcctcttgaatttttcttgttttcagtttcttttattacattttcgctcatgatataataacggtgctaatacacttaacaaaatttagtcatagataggcagcatgccagtgctgtctatctttttttgtttaaaatgcaccgtattcctcctttgcatatttttttattagaataccggttgcatctgatttgctaatattatatttttctttgattctatttaatatctcattttcttctgttgtaagtcttaaagtaacagcaacttttttctcttcttttctatctacaaccatcactgtacctcccaacatctgtttttttcactttaacataaaaaacaaccttttaacattaaaaacccaatatttatttatttgtttggacaatggacaatggacacctaggggggaggtcgtagtacccccctatgttttctcccctaaataaccccaaaaatctaagaaaaaaagacctcaaaaaggtctttaattaacatctcaaatttcgcatttattccaatttcctttttgcgtgtgatgcgctgcgtccattaaaaatcctagagctttgaaaccgaaagttaatagctgtcgctactactttcgcttacgctctaagtatattttaaggactgtcacacgcaaaaagttttctcggcataaaagtacctctacatctctaaatcgtctgtacgctgtttctcacgctttctatcgaccttctggacattatcctgtacaacatccataaactgtcccacacgctcaaatttggaatcattaaagaatttctctttaagcctattaaaccctttctcaaacccagggaaattcgccctcgcagcacgatataaagtcactgtactagcttgaaatttctctgatacattcaactgctcattcaaactatcattctctcgctttaatttattaacctctttacttttttcgtgatacccctctttccatgtattcactacttctttcaaactctctctacgtttttttaattcttgattttctgtgtaatagtctgtgctcttaatattttcgtaatcatcaacaatccgttctgcagaagagattgtttcttgcaggcgttcaaattcatcagcagttaatatctttctaccagtctcttcacgtccagagaacaaacctgtacgctcattttcataatcaaagggtttcgtagacctcatatgctctattccactctgtaactgcttatttgccttctgtaactcatccttaacttcttgcagttcctgtttatgaaatacagtatctttcttgtactgatccatcgctttatgttctcgttctgtaacctctttggacgtgcctctttcaagttcataacctttctcattcacatactcattaaatctatcttgtaattgagtaaagtctttcttgttgcctaactgttcttttgcagacaatctcccgtcctctgttaaagggacaaaaccaaagtgcatatgtgggactctttcatccagatggacagtcgcatacagcatattttccttaccgtattcattttctagaaactccaagctatctttaaaaaatcgttctatttcttctccgcttaaatcatcaaagaaatctttatcacttgtaaccagtccgtccacatgtcgaattgcatctgaccgaattttacgtttccctgaataattctcatcaatcgtttcatcaattttatctttatactttatattttgtgcgttaatcaaatcataatttttatatgtttcctcatgatttatgtctttattattatagtttttattctctctttgattatgtctttgtatcccgtttgtattacttgatcctttaactctggcaaccctcaaaattgaatgagacatgctacacctccggataataaatatatataaacgtatatagatttcataaagtctaacacactagacttatttacttcgtaattaagtcgttaaaccgtgtgctctacgaccaaaactataaaacctttaagaactttctttttttacaagaaaaaagaaattagataaatctctcatatcttttattcaataatcgcatccgattgcagtataaatttaacgatcactcatcatgttcatatttatcagagcacgtgctataattatactaattttataaggaggaaaaaatatgggcatttttagtatttttgtaatcagcacagttcattatcaaccaaacaaaaaataagtggttataatgaatcgttaataagcaaaattcatataaccaaattaaagagggttataatgaacgagaaaaatataaaacacagtcaaaactttattacttcaaaacataatatagataaaataatgacaaatataagattaaatgaacatgataatatctttgaaatcggctcaggaaaaggccattttacccttgaattagtaaagaggtgtaatttcgtaactgccattgaaatagaccataaattatgcaaaactacagaaaataaacttgttgatcacgataatttccaagttttaaacaaggatatattgcagtttaaatttcctaaaaaccaatcctataaaatatatggtaatataccttataacataagtacggatataatacgcaaaattgtttttgatagtatagctaatgagatttatttaatcgtggaatacgggtttgctaaaagattattaaatacaaaacgctcattggcattacttttaatggcagaagttgatatttctatattaagtatggttccaagagaatattttcatcctaaacctaaagtgaatagctcacttatcagattaagtagaaaaaaatcaagaatatcacacaaagataaacaaaagtataattatttcgttatgaaatgggttaacaaagaatacaagaaaatatttacaaaaaatcaatttaacaattccttaaaacatgcaggaattgacgatttaaacaatattagctttgaacaattcttatctcttttcaatagctataaattatttaataagtaagttaagggatgcataaactgcatcccttaacttgtttttcgtgtgcctattttttgtgaatcgacctgcaggcatgcaagcttaagcgagttggaatttaaatatgatatctacattatcagcagtaacatcaacctttgatacaaggttgttgacgattttctttttattatcatatgatagttcattaatcggaattgagcccaactgagttttaactaactcaaaaacatcagtagagtcattaaatttattttcgctaatcttagctttaagcagctttttctcagcctgaagggaatcagtacgatctttcaactcatccatagtgataaaatcatttaggtacaaatcagagttcttttgtatttttttatcgatctgtgaaatttgctttttaaatgacgaagtatcaagaataggttggttgttgccattgataattttcaataaggagtcattattttcttgaaatccaatcaggttgtcaataacagtattttctaaattacttaaatcataagttcctgaatcacactttttattgtcattatatactgtaattccttttgtttttcgaggaaatctatttgcacagtgatatttcatagtgcggcttccatcttttcttttgtggccaagaacaatttttaaaggtgctccacagtaaccgcaccttgccatccctgacagcatatatttagcttggaaaggtctagggttgttatttctttcataagtctgctgttgtctttcttctagctctttttgaacttttaaataagtctcataagggataattggtttgtgcataccttcaaataggctgtccttaaatttgatataaccacagtaaactggattatcaagtgtttgtcttagggtacgataagaccacggtatatctttaccgatgtgtccagattcattgagtttatctcttaattttgtaagtgatattcctgataaataatcagtgaatatttgttcaactattgtagcttgtaaaggaacaatttctaatatacctgtctttctgttgtggtaatacccaaaagctgtcttagtccacatcatagacttaccagatttcgctcgccctagtttacccatagtcatgcgttcttttatattctctctttcaaactcattaattgcagaaagaatagtgagaaacaagctacccatagcagaagaagtatcaatactttcattaagcgagataaagtctattttattttttgtgaacacatccttaacaagataaagagtatctcttacactacgtgaaaggcggtctagcttatatacaagaactgtatcaaaagctttattctcgatatcgttgattaatctttgcattgctgggcgttcaagtttggcccctgaaaaaccagcatcagtataagtatcagatacttgccaccccattgcttcagcatattttgttaaacggtcaatttgctcatcaattgagaacccttcctctgcttggttagtagtggatactcgtgtatagattgctactttcttagtcatgagatttcccccttaaaaataaattcattcaaatacagatgcattttatttcatatagtaagtacatcacctattagtttgttgtttaaacaaactaacttattttcatcttatataacctcgtcagtattttcaatattttttttagttttttatgaacacattagatttaataaagggaagattcgctatgtactatgttgatacttaatttaaagattaaacaaatggagtggatgaagtggatatcgctgatcaaacctttgtcaaaaaagtaaatcaaaagttattattaaaagaaatccttaaaaattcacctatttcaagagcaaaattatctgaaatgactggattaaataaatcaactgtctcatcacaggtaaacacgttaatgaaagaaagtatggtatttgaaataggtcaaggacaatcaagtggcggaagaagacctgtcatgcttgtttttaataaaaaggcaggatactccgttggaatagatgttggtgtggattatattaatggcattttaacagaccttgaaggaacaatcgttcttgatcaataccgccatttggaatccaattctccagaaataacgaaagacattttgattgatatgattcatcactttattacgcaaatgccccaatctccgtacgggtttattggtataggtatttgcgtgcctggactcattgataaagatcaaaaaattgttttcactccgaactccaactggagagatattgacttaaaatcttcgatacaagagaagtacaatgtgtctgtttttattgaaaatgaggcaaatgctggcgcatatggagaaaaactatttggagctgcaaaaaatcacgataacattatttacgtaagtatcagcacaggaatagggatcggtgttattatcaacaatcatttatatagaggagtaagcggcttctctggagaaatgggacatatgacaatagactttaatggtcctaaatgcagttgcggaaaccgaggatgctgggaattgtatgcttcagagaaggctttattaaaatctcttcagaccaaagagaaaaaactgtcctatcaagatatcataaacctcgcccatctgaatgatatcggaaccttaaatgcattacaaaattttggattctatttaggaataggccttaccaatattctaaatactttcaacccacaagccgtaattttaagaaatagcataattgaatcgcatcctatggttttaaattcaatgagaagtgaagtatcatcaagggtttattcccaattaggcaatagctatgaattattgccatcttccttaggacagaatgcaccggcattaggaatgtcctccattgtgattgatcattttctggacatgattacaatgtaattttttatggaatggacagctcatctttaaagatgagtttttttattctaggagtatttctgaattc

SEQ ID NO: 198 - DNA, 14593 bp, Bacillus sp.
  source 1..14593: mol_type = genomic DNA
tggaagtctttataatgaacccattacttctttaaagtcctggagagaaaatttattaaaagctcatgctgataaagaattaaatcatttaacaagtgatatttttgaacaaaatggtgaaagtccctatggagtatgcggtatgatcggcggaacatgggagtggactagaagtgagcttaaaacaaagagagctttccaccctatttttgagaatgtaccatttaatagtgttaactcatttgccgttcttaaaggaggatcattcttctctcatccaggcttaatgttcccttcttttagagcaaaagatattcctttctgtcgacacaatgaaatggggattagatgcgtaaagaatattccagtatataaaattagagaatcaattaatgggccaattactaataaagcaatttattaatcattctaggttagagacttgataaaagtatactaacattgtgtagtaatgttcagcttgtagaaaaaacaatgttttttctacaagattttattttaaatgcttttcaaaattatcagggattgagaatcagaaaaagagccattaagctcgatcttagctaggtattacgatcttctgtatattattgtgagaaatatagaagattcagttagttagcatttcgattttaagctgagcctgcaatagcaaagcatctgttttgattattctttttctgatacataagctaattttgtcgcttttcttttttgtcttttcacgcatttcgaggatgacttactataattctttcagcttttctatgtgttaagattcgaatagatgaaataactttaacaagttggtcaataagaacagatttaactttatgttaaaagagtatctcgtatagaacataagaagaatgacgagttttttaagattatcatcaattatgtgagaataaaatattataagggaaaatgaaggctgtcacgtttctcgacagccctagggaattcctctccttttcatttcgcccgtaatttcgggcacagtcccgtcggcaggcacattggcttctggtcgatcgggcttctcatgatgcagcattccaagccgaagacttcacggaaaaatggctgggtgaacacatcttccggtgttccggcgttgtatatttttccgtccagcacactgatcagatagtcagcatattgagcggcttggtttaaatcatggagcaccatgacaacggtgcggccatggtcgcggttcagctttttcagcagttcaagcacttcaatctgatgtgagatgtctaaatacgtggtcggctcatcaagcaaaagcaaatcagtgccttgcgcaagtgccatggaaatccaggctctttgtctttggccgcctgagagggcatcaagtgtccgatccttcagttcaatcatgcccgttgcttccagcgcccactctaccatgtcatgatcctcttgggtatgcttggataacagctttttgtgaggatgtctgccaaaatagcataattcctctaccgtcaatccttcaggagcctgaggagattgtggaagaatggccagtttttttgcgacttcttttgatggctggcggtggatgtcttttccttctagtagcactgtaccgctttttggggccatcagcctggcgagcgatttgaggattgttgatttaccgcagccattagcgccgatgagcgcagtgatttttccttcttctatctttaagtcgactccgtcaataatcactgtactgtcatatgaaagagtgagctggtctgcagccagttttcccatggtatcctctccctactgtttcctcgcttcgaatttcaataaatataagaaataaggcgcgccgatcacggctgtcagtattccggcaggtatttcaaccggaggcatgatgccgcgccctaacgtatctgcaattaataatataatagcaccaatcaatgccgatgcaggcagtaaatatttagctttttctccggtaagccgtctggcgatatgcggagcaagcaagccgataaaaccgattgagccgacgacggctacacagcttcccgccagcgccaccgcggtgaaaatcaggatgaatctcagccggtttgcgttttctccgagaccctgtgcaagctcatccccgagtgacataagatccagcttcggtatgagtatgcagacgatcggaaaaagaatcaaaagccatggcgcaagcagcttgacttcttcccagtttcttccccagaggcttcctgtcagccaaatgagtgcagcattcacgtcgcctggaaacttgaccatcatatattgcattccggcgtggcagaccgcgcctaaagcaatgcctgataaagccagtgaagagggctgaatgctcttttttcgggctatcattaataatagtacagcaataatggcggctccggcaaatgcggagaacggaagcacgtataccggcgactcaggaaagatgagaatcacagccatcgccgcaagtccggagccttttgaaatgccgacaacgtccggggaagcgagcggatttcggatcacaccctgtaaaatcgctccggcagcggcaagtccagcacctgccaaaatcgctaatataatgcggggaaggcgatattgctggatgataaattcaaaggaatgatccagtcccagcagattcgtcactaccgcatcaggtgaaatgtataatgcaccgattccaatgctgatgacggacagaacgattaaaatcacggccaatatgagtatcgccagtaaggggcgtttttgttttctggttgttttcttcatttcaggtttcgccctttccttgccaaatataagaaaaacggcgttccgataatcgcggtgacaatgccgaccggtgattcataaggaaatgcaatccatctggccagaacatctgcgtacaccagcaaaatggcaccgaacagtgccgaaaacggaagcacgtattgataatgttctccgatcagcttgcggacaatatgcgggacgagcagcccgacaaagccaatcggcccggcgacggctacggaagcgccggaaagaattaaaataatcaaactgatcagaatcctgatgccgttcatattttgtccaagcccttttgctgtttcgtctccgagaccgagaacagaaacagaaccggaaaatacgagggcaagcccgatgccaatgacagaaaaaggagcgatggttatgacgtcctgccagttgctgccgtcgattgcgcctgtcatccagtacagaacatcctcacctgactcatttaaaataatgatggcctgtgtcatagaggagaggaacaagtgcacggccattcctgacagcgccagcttgacaggcgtcattccgccggatgaggcaatcatatacacaatcgcgccgcctgctgccgcacccgcaaaagcgaatataacagatgaatagggcgatgccggcagaatgacgagagaagcaacaacaaaaagcgatgcacccgcattcacaccgaaaatttggggtgaagccagaggatttctggtcatagcctgcatcagcgcccctgctacagctaggctggcgccgacaaaaacgccgattaatgtgcggggaaggcgaagagtagagatgatgagctgttcctttgaaccgtcccatacaaaaagatatttcaatgaatctatgatgctgatgtctgaggctcctactgaaagattcagcccaagcccaaatataaaaataatcagtgcaatgataaacatcatcagtcttgatgatgagcgccgtttggctgaatgatacaacagtctcacttccttactgcgtctggttgcaaaaacgaagaagcaaggattcccctcgcttctcatttgtcctatttattatacacttttttaagcacatctttggcgcttgtttcactagacttgatgcctctgaatcttgtccaagtgtcacggtccgcatcatagacttgtccatttttcaccgctttgagatttttccagagcgggttcgttttccactcatctacaatggttttgccttcgttggctgagatgaacaaaatatcaggatcgattttgctcaattgctcaaggctgacctcttgataggcgttatctgacttcacagcgtgtgtaaagcctagcattttaaagatttctccgtcataggatgatgatgtatgaagctggaaggaatccgctcttgcaacgccgagaacgatgttgcggttttcatctttcggaagttcggcttttagatcgttgatgacttttttgtgctcggcaagcttttcttttccttcatcttctttatttaatgctttagcaatggtcgtaaagctgtcgatcgtttcgtcatatgtcgcttcacggctttttaattcaatcgtcggggcgatttttttcagctgtttataaatgtttttatggcgctcagcgtcagcgatgattaaatcaggcttcaaggaactgatgacctcaagattgggttcgctgcgtgtgcctacagatgtgtaatcaatggagctgccgacaagctttttaatcatatcttttttgttgtcatctgcgatgcccaccggcgtaatgccgagattgtgaacggcatccaagaatgaaagctcaagcacaaccacccgcttaggtgtgccgcttactgtcgtttttccttcttcgtcatggatcactctggaatccttagactcgcttttgccgcttccgttgttattctggcttgatgaacagccggatacaatgaggcaggcgagcaataaaacactcatgatggcaatcaacttgttagaataggtgcgcatgtcattcttccttttttcagatttagtaatgagaatcattatcacatgtaacactataatagcatggcttatcatgtcaatatttttttagtaaagaaagctgcgtttttactgctttctcatgaaagcatcatcagacacaaataagtggtatgcagcgttaccgtgtcttcgagacaaaaacgcatgggcgttggctttagaggtttcgaacatatcagcagtgacataaggaaggagagtgctgagataaccggacaatttcttttctatttcatctgttagtgcaaattcaatgtcgccgatattcatgataatcgagaaaacaaagtcgatatcgatatgaaaatgttcctcggcaaaaaccgcaagctcgtgaattcctggtgaacatccggcacgcttatggaaaatctgtttgactaaatcactcacaatccaagcattgtattgctgttctggtgaaaagtattgcattagacatacctcctgctcgtacggataaaggcagcgtttcatggtcgtgtgctccgtgcagcggcttctccttaattttgatttttctgaaaataggtcccgttcctatcactttaccatggacggaaaacaaatagctactaccattcctcctgtttttctcttcaatgttctggaatctgtttcaggtacagacgatcgggtatgaaagaaatatagaaaacatgaaggaggaatatcgacatgaaaccagttgtaaaagagtatacaaatgacgaacagctcatgaaagatgtagaggaattgcagaaaatgggtgttgcgaaagaggatgtatacgtcttagctcacgacgatgacagaacggaacgcctggctgacaacacgaacgccaacacgatcggagccaaagaaacaggtttcaagcacgcggtgggaaatatcttcaataaaaaaggagacgagctccgcaataaaattcacgaaatcggtttttctgaagatgaagccgctcaatttgaaaaacgcttagatgaaggaaaagtgcttctctttgtgacagataacgaaaaagtgaaagcttgggcataaagcaaggaaaaaaccaaaaggccaatgtcggccttttggtttttttgcggtctttgcggtgggattttgcagaatgccgcaataggatagcggaacattttcggttctgaatgtccctcaatttgctattatatttttgtgataaattggaataaaatctcacaaaatagaaaatgggggtacatagtggatgaaaaaagtgatgttagctacggctttgtttttaggattgactccagctggcgcgaacgcagctgatttaggccaccagacgttgggatccaatgatggctggggcgcgtactcgaccggcacgacaggcggatcaaaagcatcctcctcaaatgtgtataccgtcagcaacagaaaccagcttgtctcggcattagggaaggaaacgaacacaacgccaaaaatcatttatatcaagggaacgattgacatgaacgtggatgacaatctgaagccgcttggcctaaatgactataaagatccggagtatgatttggacaaatatttgaaagcctatgatcctagcacatggggcaaaaaagagccgtcgggaacacaagaagaagcgagagcacgctctcagaaaaaccaaaaagcacgggtcatggtggatatccctgcaaacacgacgatcgtcggttcagggactaacgctaaagtcgtgggaggaaacttccaaatcaagagtgataacgtcattattcgcaacattgaattccaggatgcctatgactattttccgcaatggttgtaaaacgacggccagtgaattctgatcaaatggttcagtgagagcgaagcgaacacttgattttttaattttctatcttttataggtcattagagtatacttatttgtcctataaactatttagcagcataatagatttattgaataggtcatttaagttgagcatattagaggaggaaaatcttggagaaatatttgaagaacccgaggatctagatcaggtaccgcaacgttcgcagatgctgctgaagagattattaaaaagctgaaagcaaaaggctatcaattggtaactgtatctcagcttgaagaagtgaagaagcagagaggctattgaataaatgagtagaaagcgccatatcggcgcttttcttttggaagaaaatatagggaaaatggtacttgttaaaaattcggaatatttatacaatatcatatgtatcacattgaaaggaggggcctgctgtccagactgtccgctgtgtaaaaaaaaggaataaaggggggttgacattattttactgatatgtataatataatttgtataagaaaatggaggggccctcgaaacgtaagatgaaaccttagataaaagtgctttttttgttgcaattgaagaattattaatgttaagcttaattaaagataatatctttgaattgtaacgcccctcaaaagtaagaactacaaaaaaagaatacgttatatagaaatatgtttgaaccttcttcagattacaaatatattcggacggactctacctcaaatgcttatctaactatagaatgacatacaagcacaaccttgaaaatttgaaaatataactaccaatgaacttgttcatgtgaattatcgctgtatttaattttctcaattcaatatataatatgccaatacattgttacaagtagaaattaagacacccttgatagccttactatacctaacatgatgtagtattaaatgaatatgtaaatatatttatgataagaagcgacttatttataatcattacatatttttctattggaatgattaagattccaatagaatagtgtataaattatttatcttgaaaggagggatgcctaaaaacgaagaacattaaaaacatatatttgcaccgtctaatggatttatgaaaaatcattttatcagtttgaattatgtattatggagctctgaaaaaaaggagaggataaagaatgaagaaaccgttggggaaaattgtcgcaagcaccgcactactcatttctgttgcttttagttcatcgatcgcatcggctgcacttgcaaaagacaaagttgaggtaaaggaacaagattcatatcgtgtgctaatcaaagcaccaactacatcaatcagtacttttcaatcacaatacgatgtccgttgggattttggcaaagagggatttacaacagatgttgatgccaaacagctccaaacgcttcaaagcaacaaagacattcaaattcagaaggtaaatgaaatgacagtagaaactgttacaacagaaaaggcggaagtgacggcggtaccaagtacacaaaccccttggggcataaagtcaatttataatgatcaatcaattacaaaaacaactggaggcaaaggaattaaggtagctgttttagatacaggggtttatacaagccatttagatttagctggttctgccgagcaatgcaaggattttacccaatctaatcctttagtagatggttcatgcaccgatcgccaagggcatggtacacatgttgccggaactgtattggcgcatggaggcagtaatggacaaggcgtttacggggtggctccgcaagcgaaactatgggcatataaagtattaggagataaaggcgagggatactctgatgatattgcagcagctatcagacatgtagctgatgaagcttcacgtacaggttccaaagtagtaattaatatgtcgctagggtcatctgccaaggattcattgattgctagtgcagtagattatgcatatggaaaaggtgtattaatcgttgctgcggctggtaatgaggggccaaaacctaatacaatcggctatcctgctgggttcgtaaatgcagtggcagtagcggcattggagaatgttcaggagaaaggaacttatcgagtagctgatttctcatctagagggaatccggcaactgctggagattatatcattcaagagcgtgatattgaagtttcagctccgggagcaagtgtagagtctacatggtacactggcggttataatacgatcagcggtacatcaatggctacacctcatgtagctgggttagctgctaaaatctggtcagcgaatacttcattaagtcatagccaactgcgcacagaattgcaaaatcgcgctaaagtatatgatattaaaggtggtatcggagccggacctggtgacgattatgcatcagggttcggatatccaagagtaaaataatcgcatgttcaatccgctccataatcggtcgacgcggcggttcgcgtccggacagcacatcaccgaaatatttcgacggcccagccggctagcgcgttaatccgcggatatatagcggccgcagatctgggaccaataataatgactagagaagaaagaatgaagattgttcatgaaattaaggaacgaatattggataaagtgggatatttttaaaatatatatttatgttacagtaatattgacttttaaaaaaggattgattctaatgaagaaagcagacaagtaagcctcctaaattcactttagataaaaatttaggaggcatatcaaatgaactttaataaaattgatttagacaattggaagagaaaagagatatttaatcattatttgaaccaacaaacgacttttagtataaccacagaaattgatattagtgttttataccgaaacataaaacaagaaggatataaattttaccctgcatttattttcttagtgacaagggtgataaactcaaatacagcttttagaactggttacaatagcgacggagagttaggttattgggataagttagagccactttatacaatttttgatggtgtatctaaaacattctctggtatttggactcctgtaaagaatgacttcaaagagttttatgatttatacctttctgatgtagagaaatataatggttcggggaaattgtttcccaaaacacctatacctgaaaatgctttttctctttctattattccatggacttcatttactgggtttaacttaaatatcaataataatagtaattaccttctacccattattacagcaggaaaattcattaataaaggtaattcaatatatttaccgctatctttacaggtacatcattctgtttgtgatggttatcatgcaggattgtttatgaactctattcaggaattgtcagataggcctaatgactggcttttatatgagataatgccgactgtactttttacagtcggttttctaacgatacattaataggtacgaaaaagcaactttttttgcgcttaaaaccagtcataccaataacttaagggtaactagcctcgccggaaagagcgaaaatgcctcacatttgtgccacctaaaaaggagcgatttacatatgagttatgcagtttgtagaatgcaaaaagtgaaatcagctggactaaaaggggccgcagagtagaatggaaaaggggatcggaaaacaagtatataggaggagacctatttatggcttcagaaaaagacgcaggaaaacagtcagcagtaaagcttgttccattgcttattactgtcgctgtgggactaatcatctggtttattcccgctccgtccggacttgaacctaaagcttggcatttgtttgcgatttttgtcgcaacaattatcggctttatctccaagcccttgccaatgggtgcaattgcaatttttgcattggcggttactgcactaactggaacactatcaattgaggatacattaagcggattcgggaataagaccatttggcttatcgttatcgcattctttatttcccggggatttatcaaaaccggtctcggtgcgagaatttcgtatgtattcgttcagaaattcggaaaaaaaacccttggactttcttattcactgctattcagtgatttaatactttcacctgctattccaagtaatacggcgcgtgcaggaggcattatatttcctattatcagatcattatccgaaacattcggatcaagcccggcaaatggaacagagagaaaaatcggtgcattcttattaaaaaccggttttcaggggaatctgatcacatctgctatgttcctgacagcgatggcggcgaacccgctgattgccaagctggcccatgatgtcgcaggggtggacttaacatggacaagctgggcaattgccgcgattgtaccgggacttgtaagcttaatcatcacgccgcttgtgatttacaaactgtatccgccggaaatcaaagaaacaccggatgcggcgaaaatcgcaacagaaaaactgaaagaaatgggaccgttcaaaaaatcggagctttccatggttatcgtgtttcttttggtgcttgtgctgtggatttttggcggcagcttcaacatcgacgctaccacaaccgcattgatcggtttggccgttctcttattatcacaagttctgacttgggatgatatcaagaaagaacagggcgcttgggatacgctcacttggtttgcggcgcttgtcatgctcgccaacttcttgaatgaattaggcatggtgtcttggttcagtaatgccatgaaatcatccgtatcagggttctcttggattgtggcattcatcattttaattgttgtgtattattactctcactatttctttgcaagtgcgacagcccacatcagtgcgatgtattcagcatttttggctgtcgtcgtggcagcgggcgcaccgccgcttttagcagcgctgagcctcgcgttcatcagcaacctgttcgggtcaacgactcactacggttctggagcggctccggtcttcttcggagcaggctacatcccgcaaggcaaatggtggtccatcggatttatcctgtcgattgttcatatcatcgtatggcttgtgatcggcggattatggtggaaagtactaggaatatggtagaaagaaaaaggcagacgcggtctgcctttttttattttcactccttcgtaagaaaatggattttgaaaaatgagaaaattccctgtgaaaaatggtatgatctaggtagaaaggacggctggtgctgtggtgaaaaagcggttccatttttccctgcaaacaaaaataatggggctgattgcggctctgctggtctttgtcattggtgtgctgaccattacgttagccgttcagcatacacagggagaacggagacaggcagagcagctggcggttcaaacggcgagaaccatttcctatatgccgccggttaaagagctcattgagagaaaagacggacatgcggctcagacgcaagaggtcattgaacaaatgaaagaacagactggtgcgtttgccatttatgttttgaacgaaaaaggagacattcgcagcgcctctggaaaaagcggattaaagaaactggagcgcagcagagaaattttgtttggcggttcgcatgtttctgaaacaaaagcggatggacgaagagtgatcagagggagcgcgccgattataaaagaacagaagggatacagccaagtgatcggcagcgtgtctgttgattttctgcaaacggagacagagcaaagcatcaaaaagcatttgagaaatttgagtgtgattgctgtgcttgtactgctgctcggatttattggcgccgccgtgctggcgaaaagcatcagaaaggatacgctcgggcttgaaccgcatgagatcgcggctctatatcgtgagaggaacgcaatgcttttcgcgattcgagaagggattattgccaccaatcgtgaaggcgtcgtcaccatgatgaacgtatcggcggccgagatgctgaagctgcccgagcctgtgatccatcttcctatagatgacgtcatgccgggagcagggctgatgtctgtgcttgaaaaaggagaaatgctgccgaaccaggaagtaagcgtcaacgatcaagtgtttattatcaatacgaaagtgatgaatcaaggcgggcaggcgtatgggattgtcgtcagcttcagggagaaaacagagctgaagaagctgatcgacacattgacagaggttcgcaaatattcagaggatctcagggcgcagactcatgaattttcaaataagctttatgcgattttagggctgcttgagcttggggagtatgatgaagccattgatctgattaaagaggaatatgcgatacaaaatgaacagcatgatcttttattccataacatccattcgcagcaggtgcaggccattttgttagggaaaataagcaaggcatcggaaaagaaggtcaagctggtgattgatgagaacagctcactcgcgcctcttcctgcgcatatcggcttgtcccatcttattacgattattggcaatttaattgataacgctttcgaagctgtagcggagcaaagcgtgaaggaagttttgttttttatcacggatatgggccatgacattgtcattgaagtatcagacacagggcccggtgtgccgccagagaaaatagaagctgtgtttgagagaggctattcttcaaaggggatgaggagaggctacggtctggccaatgtgaaagactcagtgcgtgaactgggcggctggatcgaactggcgaatcaaaaaactggcggggcggtattcactgtatttataccgaaggagaaacaaagggggaatccatttgattcacatcgcgattgcggaggatgattttcgagttgcgcaaatccatgagagattgattaaacagcttgatggattcaagattatcggcaaggcggctaacgcaaaagagacattggcgcttttgaaggaacacaaggctgatttgcttctgctggatatttatatgccggacgagcttgggaccgcgttgattcctgatatacgaagccgatttcctgaagtggacattatgattatcacagcggcaacagaaacccgtcatttgcaggaagcgctaagggcgggaattgcccactatttgatcaaacccgtaacagctgacaagttcaggcaggtgctgcttcagtataaagaaaaaaggaagctgctcatgtctcagccggaggtcagccaatccatgatcgaccatatttttgggaacggtgtgaagacagctttgccggcagaggatttgccgactggcattaattcgattacactgcgaaaaattaaggaagcgcttcagactgcgtcagaaggattgacagcggaggaacttggggaaaaaatgggggcgtcacgaacaactgcccgccgttatgccgagtaccttgtgtcaaaggaagaagcaagagccgagcttgaatacgggattatcggcaggccggagagaaaatattatttggcggcggattagatatgaaaaaatctataatcctattgaatattctattgatctttatgcagggtgatatcaggcaggcggctgcgccgcgcctgccggacgggccgatagaaattgtcgtccctgccgaaccttctggcggctgggatgtcacagcgcaggcgatccaatcagttttgaggcagaagcagatcgtgaaggatgatgttcatatcgtctataaatccggcggcgggggagagaaaggctggaaatatgtcaacaaaagcagcaaacaaaccatcagcatgacgtccagcctaatattgagcaatgatcttctcgggcaaagcaaattaaaaatgtccgattttacg

SEQ ID NO: 199 - DNA, 2655 bp, Acremonium exiguum
  source 1..2655: mol_type = genomic DNA
ggtcggatggtgcaatggcgaagccgtgttgttggcgatgagccctatggaagttttggctcggattgcagcagctgaaccatcgataggtaacgccacatctgctacgcaagacacatgaggtcgaagacaagcatgaaagccccatgagaacagaagccagagggggcgaaggaacgcagcgcccaatgcgagccatgagtgcggaatcaggacgcaacgcctacacagaacccactatgcccggatcacaaggctctccaagttcaagtctacgtgtaactcctatacgagggtattccttgatacaactctagcttggctcttgcctatgaggttatatccttcttcatgcatccatcgaacgacaacccaggcctgaattccaactgtaaatatatcccagctcgctgtcaaagatctcgtggcctcgaaccagctcgccactccctttatacgggacatcttagctctgccataatttcaccactcgccgaaagatgcatctttcgatctgctcactcctttgttttatcctggccggcgccgcgcaggtcatgggaggagaactgacctcgccggccacggacaacaccattgtgctctcgcgtccaagattcgccgctacgactctagagaagcgagccgagtgtggtccaggaattggatcgtgcgaccccggtttctgctgttcggagtccggaaactgtggcaaggatgaagacttctgtgacggctcgtcctgtcagctcgattatagtgattcgtgtgatacgttgtgagtgctttgactgaaactagttgtacggttggaacctgacagcccagctctcgtcctcccggttctagcacggaagaagtcgatcgtcctgaaatcggggacatcccatatggtgtgtttccatacacctgcagatacacgccgtgaaacatgcaatgatgggcgaaacgctgacactatatgccaggttccatcatcacggactgtactaccccaggtctcatggccttgacgttcgatgacgggccatggatctacacggaggagatacttgatcttctcgacgagctcgaggtgacggccacgttcttcatcgccggcaacaaccgcggcaaaggccacattgacgatgagtcaacagattggccggacatgctgcgtcgcatgcatgatgctggacatcagctggcgagccacacctggacgcatcgcagtctagacgtggtcaacagcacgatccgaaagaccgagattgtctacaacgaaatggcctttcgaaatatcttgggcttcttcccaacttatatgcggcccccatatctggaatgcggaagcgcctgtcaatcactcttgagggatttgggctaccatatcattacgatcaacatcgacaccaaagactatgaaaacgacgcccctgagctaatccagatttccaaagatcgcttctcgaacggagtctcgacagattcagatacccatgagtacattgagctgtcccacgacgtgcacgaacagaccgttcataatctcacccagttcatggtcaacgtttcgcggaaccgaggctacaaactcgtgactgtaggcgaatgcctcggcgaccccaaggagaactggtataggtccgccggcggagctggatcggccacgaccacggccgcctcgacaaacaccaagaccaccacacgcgagctcccgaccgagagcatcgccatctcgccagatcagacgtgtggcggcgacacgggttacacatgccagggctccaagttcggaaactgctgttcacattatggttactggtaagttttatcgtctacaaactcgatacgagcctcgcccttcttgctgaaactgaaattgccagtggttctggcccagcctattgtggtactgggtgcgacgtcgactttggttcctgcagcccgggctccgggggtacatcagacactacaaatgggctctgtggccctctggtggatgccacttgcatcaattacggctccaagacatgctgttcctcctccggatattggtaagttgccctcatcaaaaggggggccggcgatatgctgatcaacgaatatcagtgggaatactgtggcatactgtggcagtggatgccagtctgactacggcgactgtaattaggggagcacgaaggcattcgattcatcttccgtcatgtctctgttccaatgttgatatctatggcgcctcatgcgcttggacttggctgaaaggcagatatggagggattcaggtcacatttaacttctaatttcacctggttctaatgaaacatgtccccagaattaccgtcaccacctgctttgaattactaccaaatatcatctgcctcctggttttcaagggcagaaggttcttgcacaaagggttgggtcccctaaacacagagtctttctccagcaacgaatgttccatgtatggaaacgaatacttactttcaggcgggctcccatttgttgagcgactttctcagcccggagccatgccctgccatccaggatcggctgccgtttgcggttgtgcaaccagcttccaattcttagcagcaatacattctagtattttctgttgtaccagtacataatacgagctttgtcgcccagcaccggcccatctacatg

SEQ ID NO: 200 - DNA, 2066 bp, Trichoderma harzianum
  source 1..2066: mol_type = genomic DNA
ttactgttctattacttaatctatcatctccgtcgtcgtcgtctcttttctcttgcatcctgaggccacaccaagcaacaatattatgacaagaaggatcatgaagcacctcaaagttgccatcggggtgatcgccctcgtgattactcaaacggctgccgttcctcaggctagtattgctgctgagaatactctctgcggtcccggtctcggaaaatgtgttgggggatgttgctctgagtttggtcattgtggtactaccacgcaatactgctcaggatcgcaatgccagctcgattacagcgactcctgcgacacacagtaagtgatcaaacatgaaggaataggatctgtgtcagagacgtccaagctaacgctgcctctgcagagtcggccctggtggaagaagcactgaaaacatcgaccgtcctttctttggcgacgtcccatacggtgagcttcaacaagcaatctcttattacacctcgcatctcacatgatgaggccaggagctatgctaatcatattgcagcggagactatcactgagtgtgactctccgggtcttgtcgctttgacattcgatgacggaccctacgagtacacgaaccagctgcttgacctcctcgacgaatacaaagtcaaggccacattcttcatagccggacacaacagaggcaagggccgcattgatgacgactctacagggtatccaagagttctgcggcgcatgcgaaacgctgggcatcagctggccagccacacttggactcatcgcaaccttaacggcgtcagtgaacacgtccaaaggacagaaatgatctacaatgagatggcctttcgcaacatctttggcttcgtcccgacatacatgcgtccgcctttcctggagtgcggctcgagctctggatgcatcgatacgatggaagagctcggctaccacgtcattagcaccaatctggataccaaagattatgaaaacgacgaccctgtgctgatccaaaagtccaaggacaagttcttctccatgcaatcatccgatgagacggaccatagttacatcgttcttgcacacgacgtgcattatcagaccgtggtgacgcttgccaagtacatgattgaaacctccagggagcgagggtacaagctggtgacagttggcgagtgccttggcgatcctcctgagaactggtatcgtgtggctccctctaggcgcggattggacacgaatcaccagataccgccggtaaacgacacatatggggagttgccgcctgtaaacaacgacacgaatccggagctgccgcctgtaaacaacgatacaaatccatggacgccacctggaaacagcacaaatccatggacgccgccggagaatagcacaaatccttggactccgccggagaacaatacaaatccatggacgccgccgataaacaaccctgaccccgtcgagccgccaaagctcaatgtctcaacggaccagaggtgtggcgtcaactatgggggtaccacttgcaagggctccctttttggtgattgctgctcattcttcggttactggtaagaaagccatataccaaccccctctcttgagatggagtgagatgacacaatgcgtggtgcggtcgtactactctggctggctcatcactcagccccccgctccctcttatttacccgcgcttctatgaggaacaatgagctgctaacatgacttacaccatagtggaagaagcgacgagtattgtagcacaagctgtgatcgcaattatggagagtgcaaccttccacttggcgacgacaaagtacaggcacccattcacaatacaacaaacggcctttgcggaagagaccatgcagctacgtgtcttcactttagcaaaaagcactgctgttctcagtacggctattggtgagtttctttcggcgtcaactgttatgactgtttccactgacgtgaaaattgatatagtggcaatagtaccgctcattgtggcgaaggatgtcaaaaagggtatggtctttgcctcagcgcgggcagctttattggggtgtgaattatgt

SEQ ID NO: 201 - DNA, 1303 bp, Aspergillus oryzae
  source 1..1303: mol_type = genomic DNA
ccacgcgtccgattccctactcagagccccgagcaaccaagcagcagtatgggtgtcaatttcaaagttcttgccctgtcggccttagctactattagccatgcttcgcctctcctatatcctcgagccacagactcgaacgtcacctatgtgttcaccaaccccaatggcctgaactttactcagatgaacaccaccctgccaaacgtcactatcttcgcgacaggcggcacaatcgcgggctccagcgccgacaacaccgcaacaacaggttacaaagccggtgcagtcggcatccagacactgatcgacgcggtcccggaaatgctaaacgttgccaacgtcgctggcgtgcaagtaaccaatgtcggcagcccagacatcacctccgacattctcctgcgtctctccaaacagatcaacgaggtggtctgcaacgaccccaccatggccggtgcagtggtcacccacggcaccgacacgctcgaagaatccgccttcttcctcgacgccacggtcaactgtcgcaagcccgtggtcatcgtcggcgccatgcgcccttcaaccgccatctcggctgacggccccctcaacctcctgcaatccgtcaccgtcgccgcgagccccaaggcccgagaccgcggcgccctgattgtcatgaacgaccgcatcgtatccgccttctacgcctccaagacgaacgccaacaccgtcgatacattcaaggccatcgaaatgggtaacctgggcgaggtcgtctccaacaaaccctacttcttctaccccccagtcaagccaacaggcaagacggaagtagatatccggaacatcacctccatccccagagtcgacatcctctactcatacgaagacatgcacaatgacaccctttactccgccatcgacaacggcgcaaagggcatcgttatcgccggctccggctccggctccgtctccacccccttcagcgccgccatggaagacatcacaaccaaacacaacatccccatcgtagccagcacgcgcaccggaaacggggaggtgccgtcctccgccgagtcgagccagatcgcaagcgggtatttgaaccccgcaaagtcacgcgttttgcttggcttgttgcttgcccaggggaagagtattgaggaaatgagggcggtttttgagcggattggggttgcttgatttttttttcttttctgcttggtctttgtttagggttggggtttgtgtattatagattaaggatttatggatgggatggataatagattatagattatagattaagtatcgattatgg

SEQ ID NO: 202 - DNA, 1482 bp, Bacillus licheniformis
  source 1..1482: mol_type = unassigned DNA
atgaaattaattaaaaatgcttcttttattatttcttttttagctgctgctggtatttattttttattaggtactgttgctgcttctgctgctaatgaagattatcctgaacaaatgattcgtttagaatcttcttctggtttaaatattactcctgctggtaatcaagataatgctcctttaactgctaaacaaacttctggtgaaaaagaagaacgttggcgtttagatacttctgatggtaaacaatttaaaattcgtaatatggattctggtaaaattattattcctgctcattatgctttatctgataataatcctgctgttgtttattatgataattctcgtaaagaagaattatggaatattattggtgctgataaagatggtaatggtgattttattacttataaaattgtttctgctcaaaattcttctttagctttaactttagatggttctggtgttaaattagctaaatatactggttcttctgttcaaaaatggaaattaccttctgatggtttagaaggttttgctggttatgctcgtgaaactaatggtaaacaaaaaactggtactactggtggtttattaggtaaagttgtttatgttaataatttaggtgaattaaaagctaatattgaagattctactcctcgtactattgttgtttcttctaatattggtgcttctgctaaaactgttttaactgttggtgctaataaaactattattggttcttatgaaaaacataaattaaataatatttattttaaaactaaagctgattctggtaatgttatttttaaaaatttagttattgctcatgatgcttctattaatgaaaataatgatattcctgtttatattactgattctcgtaattattggattgatcatgttacttttcaaggtcattcttatactgctaatggtcatgatttagataaattattatatgttggtgctaaagctgattatgttactttatctcattctacttttactgatcatcgttatggtttaattttaggttggcctcaagatgataaacaatatcattctatttataatggttatcctcgtatgactatttctcataatcgttttgaaaatttatatgttcgtgctcctggtttaatgcgttatggttattatcatgttaaatctaattatattaataattatcatttaggttttactattactactttagctaaaatttattctgaagctaattattttggtactggtaatgaaaaaggtattttagatgattatggtgatggtgcttttaaagatgttggttcttatcctgctattaaaggtcaaaaatctcctgaaacttcttggactccttcttctaattattcttatcgtactatgaaagctggtaatgctaaagcttttgctaaacgttatgctggtgctcaacgtactgctttatattatgctaattattctcaatttaaaaaagat

SEQ ID NO: 203 - DNA, 3391 bp, Trichoderma harzianum; identical to SEQ ID NO: 81
  source 1..3391: mol_type = genomic DNA
